(19) United States
(12) Patent Application Publication
(10) Pub. No.: US 2023/0357868 A1
(43) Pub. Date: Nov. 9, 2023

(54) COMPOSITIONS AND METHODS FOR OBTAINING PLANT CULTIVARS WITH DESIRED TERPENE PROFILES BASED ON TERPENE SYNTHASE GENE SELECTION

(71) Applicant: Front Range Biosciences, Inc., Boulder, CO (US)

(72) Inventors: Christopher Stephen PAULI, Boulder, CO (US); Anthony TORRES, Oakland, CA (US); Reginald GAUDINO, San Marcos, CA (US); Keith ALLEN, Port Ludlow, WA (US); Thomas BLANK, Palmetto, FL (US); Kymron DE CESARE, Los Gatos, CA (US)

(21) Appl. No.: 18/090,439

(22) Filed: Dec. 28, 2022

Related U.S. Application Data
(60) Provisional application No. 63/296,809, filed on Jan. 5, 2022.
(60) Provisional application No. 63/294,843, filed on Dec. 29, 2021.

(51) Int. Cl. A01H 1/00; C12Q 1/6895; C12Q 1/6851

(52) U.S. Cl. CPC C12Q 1/6895; A01H 1/127; C12Q 1/6851; C12Q 2600/13; C12Q 2600/156; C12Q 2600/158

(57) ABSTRACT

This technology relates in part to methods and compositions for identifying and/or selecting one or more terpene synthase genes and/or variants thereof in a plant, based on which a plant with a desired terpene profile can be obtained and/or used. A desired terpene profile of a plant (i.e., the types and, optionally, the relative amounts of terpenes in a plant) can include, for example, an energetic terpene profile, an anti-nociceptive terpene profile and an insecticidal terpene profile.

### RELATED PATENT APPLICATIONS

[0001] This patent application claims the benefit of U.S. Provisional Pat. Application No. 63/294,843, filed Dec. 29, 2021, entitled COMPOSITIONS AND METHODS FOR OBTAINING PLANT CULTIVARS WITH DESIRED TERPENE PROFILES BASED ON TERPENE SYNTHASE GENE SELECTION, naming Christopher Stephen PAULI et al. as inventors, and designated by Attorney Docket No. FRB-1004PROV1. This patent application also claims the benefit of U.S. Provisional Pat. Application No. 63/296,809, filed Jan. 5, 2022, entitled COMPOSITIONS AND METHODS FOR OBTAINING PLANT CULTIVARS WITH DESIRED TERPENE PROFILES BASED ON TERPENE SYNTHASE GENE SELECTION, naming Christopher Stephen PAULI et al. as inventors, and designated by Attorney Docket No. FRB-1004PROV2.

[0002] This patent application is related to PCT Application No. PCT/US2021/039461, filed on Jun. 28, 2021, entitled CHARACTERIZATION OF PLANT CULTIVARS BASED ON TERPENE SYNTHASE GENE PROFILES, naming Christopher Stephen PAULI et al. as inventors, and designated by Attorney Docket No. FRB-1002PCT, and also is related to U.S. Application No. 17/361,187, filed on Jun. 28, 2021, entitled CHARACTERIZATION OF PLANT CULTIVARS BASED ON TERPENE SYNTHASE GENE PROFILES, naming Christopher Stephen PAULI et al. as inventors, and designated by Attorney Docket No. FRB-1002T1. The entire content of each of the foregoing patent applications is incorporated herein by reference for all purposes, including all text, tables and drawings.

### SEQUENCE LISTING

[0003] The instant application contains a Sequence Listing which has been submitted electronically in XML file format and is hereby incorporated by reference in its entirety. Said XML copy, created on Jul. 19, 2023, is named FRB-1004_SL.xml and is 2,244,367 bytes in size.

### FIELD

[0004] The technology relates in part to methods and compositions for identifying and/or selecting one or more terpene synthase genes and/or variants thereof in a plant, based on which a plant with a desired terpene profile can be obtained and/or used. A desired terpene profile of a plant (i.e., the types and, optionally, the relative amounts of terpenes in a plant) can include, for example, an energetic terpene profile, an anti-nociceptive terpene profile and an insecticidal (insect deterrent) terpene profile.

### BACKGROUND

[0005] Terpenes are the largest and most structurally diverse class of natural compounds. They are produced by a large variety of plants, fungi, bacteria, and a few insects. To date, around 50,000 terpenoid metabolites, including monoterpenes, sesquiterpenes, and diterpenes, have been identified from higher plants, liverworts, and fungi. Terpenes play central roles in plant communication with the environment, including attracting beneficial organisms, repelling harmful ones, and facilitating communication between plants. The diversity of terpenoid compounds produced by plants plays an important role in mediating plant-herbivore, plant-pollinator, and plant-pathogen interactions. In plants such as Cannabis cultivars (e.g., Cannabis sativa), monoterpenes and sesquiterpenes are also responsible for most of their odor and flavor properties. Thus, variation in terpene content can be an important differentiator between cultivars of plants.

[0006] Terpene synthases (TPSs) are the key enzymes responsible for the biosynthesis of terpenes. Angiosperms, such as Cannabis, tend to have moderately large families of these enzymes, with both divergent and convergent evolution taking place. Thus, some TPS enzymes are highly divergent in sequence, while others differ from existing enzymes by just a few amino acids. Regardless, in general, the product profile of a given TPS enzyme cannot readily be determined from sequence similarity with or differences from other TPS gene family members. Therefore, for a given plant cultivar, there is a need to reliably identify all the members of the TPS gene family that are present, regardless of whether they are similar or different in sequence, in order to characterize the terpene production profile of a plant cultivar. There further is a need to identify plant cultivars, including cultivars of the family Rosidae and the sub-family Cannabis, that produce a terpene profile of interest, e.g., one or more of an energetic profile, an anti-nociceptive profile and an insecticidal (insect deterrent) profile.

### SUMMARY

[0007] Provided herein are methods and compositions for analyzing a plant cultivar, used interchangeably herein with plant, comprising identifying and/or selecting, in the plant cultivar, using at least one set of polynucleotide primers as provided herein, at least one terpene synthase gene that produces a terpene profile of interest, e.g., a terpene profile selected from among one or more of an energetic profile, an anti-nociceptive profile and an insecticidal profile. In certain embodiments, provided herein are compositions and methods for breeding plants with improved energetic, anti-nociceptive and/or insecticidal profiles by identifying/selecting parental plant cultivars that produce offspring having increased amounts of desired terpenes, or combinations of terpenes, that produce increased energetic, anti-nociceptive and/or insecticidal effects.

[0008] In certain embodiments of the methods provided herein, one or more of the polynucleotide primer pairs are selected from among a subset of those set forth in Table B (SEQ ID NOS: 1-1284, 1398 and 1399), in Primer Groups 1-19 as set forth in Tables 1-16 and in B3/F3 polynucleotide primer pairs set forth in Tables 17-35. In embodiments of the methods provided herein, one or more of the polynucleotide primer pairs are selected from among a subset of those set forth in SEQ ID NOS: 1-1284, 1398 and 1399, in Primer Groups 1-19 as set forth in Tables 1-16 and in B3/F3 polynucleotide primer pairs set forth in Tables 17-35, and/or from among sequences that share 90%, 91%, 92%, 93%, 94%, 95%, 96%, 97%, 98%, 99% or more identity with any of the sequences set forth in SEQ ID NOS: 1-1284, 1398 and 1399, in Primer Groups 1-19 as set forth in Tables 1-16 or in B3/F3 polynucleotide primer pairs set forth in Tables 17-35, or sequences that share 90%, 91%, 92%, 93%, 94%, 95%, 96%, 97%, 98%, 99% or more identity with any of the polynucleotide primer pair sequences set forth in in B3/F3 polynucleotide primer pairs set forth in Tables 17-35.

[0009] In embodiments of any of the methods provided herein, a plurality of plant cultivars can be analyzed. In certain embodiments, the plant cultivars are of the same species. In embodiments, the plurality of plant cultivars can be classified based on lineage and/or based on medicinal use.

[0010] In certain embodiments of the methods provided herein, one or more plant cultivars is/are a Cannabis cultivar. In aspects, the Cannabis cultivar is selected from among one or more of Type 1, Type 2, Type 3, Type 4 and Type 5 cultivars. In embodiments, one or more plant cultivars are of the family Rosidae.

[0011] In any of the methods provided herein, in certain embodiments, at least one plant cultivar that is analyzed produces one or more terpenes selected from among α-Bisabolol, endo-Borneol, Camphene, Camphor, 3-Carene, Caryophyllene, Caryophyllene Oxide, α-Cedrene, Cedrol, Citronellol, Eucalyptol (1,8 Cineole), α-Farnesene, β-Farnesene, Fenchol, Fenchone, Geraniol, Geranyl Acetate, Guaiol, Humulene, Isoborneol, Isopulegol, D-Limonene, Linalool, Menthol, β-Myrcene, Nerol, trans-Nerolidol, cis-Nerolidol, trans-Ocimene, cis-Ocimene, α-Phellandrene, Phytol 1, Phytol 2, α-Pinene, β-Pinene, Pulegone, Sabinene, Sabinene Hydrate, α-Terpinene, γ-Terpinene, α-Terpineol, Terpinolene, Valencene, γ-Elemene, Z-Ocimene, E-Ocimene, α-Thujone, Thujene, γ-Muurolene, 2-Norpinene, α-Santalene, α-Selinene, Germacrene D, Eudesma-3,7(11)-diene, δ-Cadinol, trans-α-Beramotene, trans-2-pinanol, p-cymen-8-ol, Sativene, Cyclosativene, α-guaiene, γ-gurjunene, α-bulnesene, Bulnesol, α-eudesmol, β-eudesmol, Hedycaryol, γ-eudesmol, Alloaromadendrene, p-cymene, α-Copaene, β-Elemene, α-Cubebene, Linalyl acetate, Bornyl acetate, Heptacosane, Tricosane, S-Limonene, (-)-Thujopsene, Hashenene 5,5-dimethyl-1-vinylbicyclo[2.1.1]hexane, (-)-englerin A and Artemisinin.

[0012] In embodiments, the at least one plant cultivar includes terpene synthases that produce, singly or as combinations of terpene synthases, one or more terpenes selected from among α-Bisabolol, endo-Borneol, Camphene, Camphor, 3-Carene, Caryophyllene, Caryophyllene Oxide, α-Cedrene, Cedrol, Citronellol, Eucalyptol (1,8 Cineole), α-Farnesene, β-Farnesene, Fenchol, Fenchone, Geraniol, Geranyl Acetate, Guaiol, Humulene, Isoborneol, Isopulegol, D-Limonene, Linalool, Menthol, β-Myrcene, Nerol, trans-Nerolidol, cis-Nerolidol, trans-Ocimene, cis-Ocimene, α-Phellandrene, Phytol 1, Phytol 2, α-Pinene, β-Pinene, Pulegone, Sabinene, Sabinene Hydrate, α-Terpinene, γ-Terpinene, α-Terpineol, Terpinolene, Valencene, γ-Elemene, Z-Ocimene, E-Ocimene, α-Thujone,Thujene, γ-Muurolene, 2-Norpinene, α-Santalene, α-Selinene, Germacrene D, Eudesma-3,7(11)-diene, δ-Cadinol, trans-α-Beramotene, trans-2-pinanol, p-cymen-8-ol, Sativene, Cyclosativene, α-guaiene, γ-gurjunene, α-bulnesene, Bulnesol, α-eudesmol, β-eudesmol, Hedycaryol, γ-eudesmol, Alloaromadendrene, p-cymene, α-Copaene, β-Elemene, α-Cubebene, Linalyl acetate, Bornyl acetate, Heptacosane, Tricosane, S-Limonene, (-)-Thujopsene, Hashenene 5,5-dimethyl-1-vinylbicyclo[2.1.1]hexane, (-)-englerin A and Artemisinin.

[0013] In certain embodiments of the methods provided herein, a terpene production profile is determined for one or more terpenes selected from among α-Bisabolol, endo-Borneol, Camphene, Camphor, 3-Carene, Caryophyllene, Caryophyllene Oxide, α-Cedrene, Cedrol, Citronellol, Eucalyptol (1,8 Cineole), α-Farnesene, β-Farnesene, Fenchol, Fenchone, Geraniol, Geranyl Acetate, Guaiol, Humulene, Isoborneol, Isopulegol, D-Limonene, Linalool, Menthol, β-Myrcene, Nerol, trans-Nerolidol, cis-Nerolidol, trans-Ocimene, cis-Ocimene, α-Phellandrene, Phytol 1, Phytol 2, α-Pinene, β-Pinene, Pulegone, Sabinene, Sabinene Hydrate, α-Terpinene, γ-Terpinene, α-Terpineol, Terpinolene, Valencene, γ-Elemene, Z-Ocimene, E-Ocimene, α-Thujone, Thujene, γ-Muurolene, 2-Norpinene, α-Santalene, α-Selinene, Germacrene D, Eudesma-3,7(11)-diene, δ-Cadinol, trans-α-Beramotene, trans-2-pinanol, p-cymen-8-ol, Sativene, Cyclosativene, α-guaiene, γ-gurjunene, α-bulnesene, Bulnesol, α-eudesmol, β-eudesmol, Hedycaryol, γ-eudesmol, Alloaromadendrene, p-cymene, α-Copaene, β-Elemene, α-Cubebene, Linalyl acetate, Bornyl acetate, Heptacosane, Tricosane, S-Limonene, (-)-Thujopsene, Hashenene 5,5-dimethyl-1-vinylbicyclo[2.1.1]hexane, (-)-englerin A and Artemisinin.

[0014] In embodiments of the methods provided herein, at least one plant cultivar that is analyzed expresses one or more terpene synthases selected from among TPS11, TPS11-like, TPS12, TPS12-like, TPS13, TPS13-like, TPS13-like2, TPS14, TPS15, TPS16, TPS17, TPS18, TPS19, TPS1, TPS20, TPS23, TPS24, TPS2, TPS30, TPS30-like, TPS32, TPS33, TPS36, TPS37, TPS38, TPS39, TPS3, TPS40, TPS41, TPS42, TPS43, TPS44, TPS45, TPS46, TPS47, TPS48, TPS49, TPS4, TPS4-like, TPS50, TPS51, TPS52, TPS53, TPS54, TPS55, TPS56, TPS57, TPS58, TPS59, TPS5, TPS5, TPS60, TPS61, TPS62, TPS63, TPS64, TPS6, TPS6-like, TPS7, TPS8, TPS8, TPS8-like, TPS9, TPS9, TPS9-like and TPS9-like2. In certain embodiments, a terpene synthase expression profile is determined for one or more terpene synthases selected from among TPS11, TPS11-like, TPS12, TPS12-like, TPS13, TPS13-like, TPS13-like2, TPS14, TPS15, TPS16, TPS17, TPS18, TPS19, TPS1, TPS20, TPS23, TPS24, TPS2, TPS30, TPS30-like, TPS32, TPS33, TPS36, TPS37, TPS38, TPS39, TPS3, TPS40, TPS41, TPS42, TPS43, TPS44, TPS45, TPS46, TPS47, TPS48, TPS49, TPS4, TPS4-like, TPS50, TPS51, TPS52, TPS53, TPS54, TPS55, TPS56, TPS57, TPS58, TPS59, TPS5, TPS5, TPS60, TPS61, TPS62, TPS63, TPS64, TPS6, TPS6-like, TPS7, TPS8, TPS8, TPS8-like, TPS9, TPS9, TPS9-like and TPS9-like2. In certain embodiments, the one or more terpene synthases are selected from among TPS11JL, TPS11-likeJL, TPS12JL, TPS12-likeJL, TPS13JL, TPS13-likeJL, TPS13-like2JL, TPS14JL, TPS15JL, TPS16JL, TPS17JL, TPS18JL, TPS19JL, TPS1JL, TPS20JL, TPS23JL, TPS24JL, TPS2JL, TPS30JL, TPS30-likeJL, TPS32JL, TPS33JL, TPS36JL, TPS37JL, TPS38JL, TPS39JL, TPS3JL, TPS40JL, TPS41JL, TPS42JL, TPS43JL, TPS44JL, TPS45JL, TPS46JL, TPS47JL, TPS48JL, TPS49JL, TPS4JL, TPS4-likeJL, TPS50JL, TPS51JL, TPS52JL, TPS53JL, TPS54JL, TPS55JL, TPS56JL, TPS57JL, TPS58JL, TPS59JL, TPS5JL, TPS5JL, TPS60JL, TPS61JL, TPS62JL, TPS63JL, TPS64JL, TPS6JL, TPS6-likeJL, TPS7JL, TPS8JL, TPS8JL, TPS8-likeJL, TPS9JL, TPS9JL, TPS9-likeJL and TPS9-like2JL.

[0015] In certain embodiments of the methods provided herein, the plant cultivar is a Cannabis cultivar selected from among Cannabis sativa (Cs), a Cannabis indica, or Cannabis ruderalis, such as Sour Kusk (SK), Chocolate Kush (Choc), Black Label Kush (BL), BC Kush (BC), Lemon Skunk (LS), AK-47 (AK), Jamaican Lion (JL), Purple Kush (PK), CannaTsu (CT), Finola (FN), Valley Fire (VF), Cherry Chem (CC), LPA004 (L4), LPA005 (L5), and LPA021.3 (L21). Examples of Cannabis genomes include CS10, Arcata Trainwreck, Grape Stomper, Citrix, Black 84, Headcheese, Red Eye OG, Tahoe OG, Master Kush, Chem 91, Domnesia, Sour Tsunami, Sour Tsunami_x_CK, Tibor_1_2016, 80 E-1, 80 E-2, 80 E-3, Harlox, Saint Jack, Herijuana, Mothers Milk_5, Black Beauty, Sour Diesel, JL_1, JL_2, JL_3, JL_4, JL_5, JL_6, JL_father, BBCC_x_JL_father, JL_mother, JL_mother_p, IdaliaFT_1, Fedora17_6_1, Carmal_1_2016, CS_1_2016, EICam_1_2016, C3/USO-1, Carmagnola_3, and Merino_S_1.

[0016] In any of the methods provided herein, in certain embodiments, the methods further include, based on identifying one or more terpene synthase genes and/or paralogs thereof, determining the expression profile of one or more terpene synthase genes and/or paralogs thereof, determining the production profile of one or more terpenes, determining the production profile of one or more cannabinoids, determining the production profile of one or more flavonoids or a combination thereof, selecting a plant cultivar for in-breeding or out-crossing, or for cultivating as a crop. In certain embodiments, the plant cultivar is selected for its lineage that is assigned, and/or a medicinal use that is assigned based on identifying one or more terpene synthase genes and/or paralogs thereof, determining the expression profile of one or more terpene synthase genes and/or paralogs thereof, determining the production profile of one or more terpenes, determining the production profile of one or more cannabinoids, determining the production profile of one or more flavonoids or a combination thereof. In embodiments, the plant cultivar is selected for resistance to an organism or situation that is identified based on identifying and/or quantifying one or more terpene synthase genes and/or paralogs thereof, determining the expression profile of one or more terpene synthase genes and/or paralogs thereof, determining the production profile of one or more terpenes, determining the production profile of one or more cannabinoids, determining the production profile of one or more flavonoids or a combination thereof. In certain embodiments, the plant cultivar is selected for having an affinity towards an organism or situation that is identified based on identifying and/or quantifying one or more terpene synthase genes and/or paralogs thereof, determining the expression profile of one or more terpene synthase genes and/or paralogs thereof, determining the production profile of one or more terpenes, determining the production profile of one or more cannabinoids, determining the production profile of one or more flavonoids or a combination thereof. In embodiments, the organism or situation is selected from among insects, pests, mold, pesticides and other chemicals, mildew, fungi, bacteria, viruses and other pathogens, an environmental condition, such as climate or soil conditions, or a geographic location. In certain embodiments, the plant cultivar is selected for root-specific, stem-specific, leaf-specific or flower-specific expression of a terpene synthase gene and/or paralog thereof, a terpene, a cannabinoid or a flavonoid based on identifying one or more terpene synthase genes, determining the expression profile of one or more terpene synthase genes, determining the production profile of one or more terpenes, determining the production profile of one or more cannabinoids, determining the production profile of one or more flavonoids or a combination thereof. Also provided herein are methods of breeding any of the plant cultivars selected according to the methods provided herein. Also provided herein are methods of cultivating a crop of any of the plant cultivars selected according to the methods provided herein. Also provided herein are methods of treatment comprising administering a plant cultivar selected according to the methods provided herein, or a portion thereof (e.g., seed, root, stem, flower) or an extract thereof (e.g., extracts from tissues of the plant cultivar) to a subject having a condition or disease in need of such treatment, whereby the condition or disease, or symptoms thereof, are ameliorated or reduced.

[0017] In certain embodiments of the methods provided herein, the methods include, based on identifying one or more terpene synthase genes and/or paralogs thereof, determining the expression profile of the one or more terpene synthase genes and/or paralogs thereof, determining the production profile of one or more terpenes, determining the production profile of one or more cannabinoids, determining the production profile of one or more flavonoids or a combination thereof, genetically modifying a plant cultivar whereby the expression of at least one terpene synthase gene and/or paralog thereof is inhibited or increased in the plant cultivar. In certain embodiments, the genetic modification increases the production of at least one terpene or decreases the production of at least one terpene in the plant cultivar. In embodiments, the plant cultivar is of a Cannabis cultivar. In certain aspects, the Cannabis cultivar is selected from among one or more of Type 1, Type 2, Type 3, Type 4 and Type 5 cultivars. In embodiments, one or more plant cultivars are of the family Rosidae.

[0018] Also provided herein are methods of breeding daughter plant cultivars for improved energetic terpene profiles, anti-nociceptive terpene profiles and/or insecticidal terpene profiles based on the properties of the parent plant cultivars, analyzed according to the methods provided herein, that are selected for breeding the daughter plant cultivar.

[0019] Also provided herein is a method of treatment of a subject having a disease or condition, the method including:
[0020] analyzing at least one plant cultivar by any of the methods provided herein;
[0021] based on identifying one or more terpene synthase genes, determining the expression profile of one or more terpene synthase genes, determining the production profile of one or more terpenes, identifying the plant cultivar as having an energetic terpene profile, an anti-nociceptive terpene profile and/or an insecticidal terpene profile; and
[0022] administering the plant cultivar or a portion or extract thereof to the subject.

[0023] In certain embodiments, a terpene production profile is determined for one or more terpenes selected from among α-Bisabolol, endo-Borneol, Camphene, Camphor, 3-Carene, Caryophyllene, Caryophyllene Oxide, α-Cedrene, Cedrol, Citronellol, Eucalyptol (1,8 Cineole), α-Farnesene, β-Farnesene, Fenchol, Fenchone, Geraniol, Geranyl Acetate, Guaiol, Humulene, Isoborneol, Isopulegol, D-Limonene, Linalool, Menthol, β-Myrcene, Nerol, trans-Nerolidol, cis-Nerolidol, trans-Ocimene, cis-Ocimene, α-Phellandrene, Phytol 1, Phytol 2, α-Pinene, β-Pinene, Pulegone, Sabinene, Sabinene Hydrate, α-Terpinene, γ-Terpinene, α-Terpineol, Terpinolene, Valencene, γ-Elemene, Z-Ocimene, E-Ocimene, α-Thujone,Thujene, γ-Muurolene, 2-Norpinene, α-Santalene, α-Selinene, Germacrene D, Eudesma-3,7(11)-diene, δ-Cadinol, trans-α-Beramotene, trans-2-pinanol, p-cymen-8-ol, Sativene, Cyclosativene, α-guaiene, γ-gurjunene, α-bulnesene, Bulnesol, α-eudesmol, β-eudesmol, Hedycaryol, γ-eudesmol, Alloaromadendrene, p-cymene, α-Copaene, β-Elemene, α-Cubebene, Linalyl acetate, Bornyl acetate, Heptacosane, Tricosane, S-Limonene, (-)-Thujopsene, Hashenene 5,5-dimethyl-1-vinylbicyclo[2.1.1]hexane, (-)-englerin A and Artemisinin. In certain embodiments, at least one plant cultivar that is analyzed expresses one or more terpene synthases selected from among TPS11, TPS11-like, TPS12, TPS12-like, TPS13, TPS13-like, TPS13-like2, TPS14, TPS15, TPS16, TPS17, TPS18, TPS19, TPS1, TPS20, TPS23, TPS24, TPS2, TPS30, TPS30-like, TPS32, TPS33, TPS36, TPS37, TPS38, TPS39, TPS3, TPS40, TPS41, TPS42, TPS43, TPS44, TPS45, TPS46, TPS47, TPS48, TPS49, TPS4, TPS4-like, TPS50, TPS51, TPS52, TPS53, TPS54, TPS55, TPS56, TPS57, TPS58, TPS59, TPS5, TPS5, TPS60, TPS61, TPS62, TPS63, TPS64, TPS6, TPS6-like, TPS7, TPS8, TPS8, TPS8-like, TPS9, TPS9, TPS9-like and TPS9-like2. In certain embodiments, the one or more terpene synthases are selected from among TPS11JL, TPS11-likeJL, TPS12JL, TPS12-likeJL, TPS13JL, TPS13-likeJL, TPS13-like2JL, TPS14JL, TPS15JL, TPS16JL, TPS17JL, TPS18JL, TPS19JL, TPS1JL, TPS20JL, TPS23JL, TPS24JL, TPS2JL, TPS30JL, TPS30-likeJL, TPS32JL, TPS33JL, TPS36JL, TPS37JL, TPS38JL, TPS39JL, TPS3JL, TPS40JL, TPS41JL, TPS42JL, TPS43JL, TPS44JL, TPS45JL, TPS46JL, TPS47JL, TPS48JL, TPS49JL, TPS4JL, TPS4-likeJL, TPS50JL, TPS51JL, TPS52JL, TPS53JL, TPS54JL, TPS55JL, TPS56JL, TPS57JL, TPS58JL, TPS59JL, TPS5JL, TPS5JL, TPS60JL, TPS61JL, TPS62JL, TPS63JL, TPS64JL, TPS6JL, TPS6-likeJL, TPS7JL, TPS8JL, TPS8JL, TPS8-likeJL, TPS9JL, TPS9JL, TPS9-likeJL and TPS9-like2JL.

[0024] The plant cultivars analyzed and/or genetically modified according to the methods provided herein can be used in methods of breeding, of cultivating crops, of treatment and other uses as provided herein. In certain embodiments, when the plant cultivars are genetically modified, they can be screened for the existence of the genetic modification using any of the solid supports or collections of solid supports according to any of the methods provided herein. In embodiments, the existence of a mutation in a plant cultivar can be detected using any of the solid supports or collections of solid supports according to any of the methods provided herein.

[0025] Certain embodiments are described further in the following description, examples, claims and drawings.

### BRIEF DESCRIPTION OF THE DRAWINGS

[0026] The drawings illustrate embodiments of the technology and are not limiting. For clarity and ease of illustration, the drawings are not made to scale, and, in some instances, various aspects may be shown exaggerated or enlarged to facilitate an understanding of particular embodiments.

[0027] FIG. 1 provides examples of nucleic acid sequences encoding terpene synthases that can be detected to identify and/or select plant cultivars having one or more of an energetic profile, an anti-nociceptive profile and an insectical profile using the methods and compositions provided herein.

[0028] FIG. 2 depicts the terpene product profiles of alleles of the TPS20 terpene synthase gene.

[0029] FIG. 3 depicts a representative correlation between the detection of certain terpene synthase-specific exons using High Resolution Melt (HRM) analysis in Cannabis cultivars and the terpene distribution profiles (chemical phenotypes) of those cultivars.

### DETAILED DESCRIPTION

### Overview

[0030] Provided herein are methods and compositions for analyzing a plant cultivar comprising identifying and/or selecting, in the plant cultivar, at least one terpene synthase gene that produces a terpene product profile (used interchangeably herein with terpene profile) of interest, e.g., a terpene profile selected from among one or more of an energetic profile, an anti-nociceptive profile and an insecticidal profile. As used herein, an “energetic profile” means a terpene profile containing at least one terpene that imparts energy when administered to a subject, such as strength and/or vitality for sustained physical or mental activity, e.g., by mood elevation or by increased oxygenation of the brain, and/or a terpene profile that does not contain or contains a reduced amount of at least one terpene that has a sedative effect when administered to a subject, such as decreased physical or mental activity, e.g., by mood depression or calming. As used herein, an “antinociceptive profile” means a terpene profile containing at least one terpene that inhibits or blocks sensitivity to pain when administered to a subject. As used herein, an “insecticidal profile” means a terpene profile containing at least one terpene associated with one or more of insecticidal activity, such as a neurotoxic effect on the insect, oviposition deterrence, insect fumigant activity, contact toxicity to an insect and insect herbivore predator attractant.

### Terpenes

[0031] Terpenes are aromatic compounds that are a class of unsaturated compounds found in the essential oils of many plants. As used herein, the term “plant” or “plant cultivar” includes any and all plant species that produce terpenes, including for example, angiosperms, any species of woody, ornamental or decorative, crop or cereal, fruit or vegetable, fruit plant or vegetable plant, flower or tree, macroalga or microalga, phytoplankton and photosynthetic algae (e.g., green algae Chlamydomonas reinhardtii). A plant also refers to a unicellular plant (e.g. microalga) and a plurality of plant cells that are largely differentiated into a colony (e.g. volvox) or a structure that is present at any stage of a plant’s development. Such structures include, but are not limited to, a fruit, a flower, a seed, a shoot, a stem, a leaf, a root, plant tissue sand the like. As used herein, the term “plant tissue” includes differentiated and undifferentiated tissues of plants including those present in roots, shoots, leaves, pollen, seeds and tumors, as well as cells in culture (e.g., single cells, protoplasts, embryos, callus, etc.). Plant tissue can be in planta, in organ culture, tissue culture, or cell culture. Any of the foregoing plant cultivars, portions thereof or extracts thereof are contemplated for use, e.g., as plant samples, in the methods provided herein.

[0032] The term “strain” is used interchangeably herein with “cultivar” (cultivated variety), “plant cultivar” or “variety” and refers to a species of a family of plants, such as a species of a Cannabis plant. A cultivar generally has been cultivated for desirable characteristics, such as color, shape, smell, medicinal use, etc., that are maintained during propagation. Phrases such as “plurality of strains of a plant” or “plurality of cultivars of a plant” or equivalent phrases, as used herein, refers to multiple species of the same plant, e.g., multiple species of Cannabis plant cultivars such as Jamaican Lion, Purple Kush, CannaTsu, Finola, Valley Fire, Cherry Chem and the like. The terms “strain,” “cultivar,” (cultivated variety), “plant cultivar” or “variety” also can be used interchangeably herein with “chemovar,” such as when the plant species is characterized by its chemical or biological profile, such as one or more of a terpene synthase gene profile, a terpene synthase expression profile, a terpene profile, a flavonoid profile, a cannabinoid profile or any combination thereof. The term “profile,” as used herein, can refer to the type and/or abundance (level of expression, in the case of a gene such as a terpene synthase) of each analyte of the group that is profiled, e.g., each terpene in a group of terpenes of a plant cultivar that are profiled, or each terpene synthase in a group of terpene synthasess of a plant cultivar that are profiled.

[0033] The molecular structures of terpenes consist of five carbon isoprene units. Mono terpenes contain 2 isoprene units, sesquiterpenes contain 3 isoprene units, and diterpenes contain 4 isoprene units. These aromatic compounds create the characteristic scent of many plants, such as Cannabis, pine, and lavender, as well as fresh orange peel. The fragrance of most plants is due to a combination of terpenes. Terpenes play central roles in plant communication with the environment, including attracting beneficial organisms, repelling harmful ones, and communication between plants. In nature, these terpenes can protect the plants from animal grazing or infectious germs.

[0034] Terpenes also can offer health benefits to animals, including humans. Terpenes and essential oils have been studied over decades as remedies for a variety of medical conditions and have been found to have a wide range of biological and therapeutic properties. For example, terpenes are known to have antioxidant, anti-inflammatory, antibacterial, antiviral, anti-anxiety, antinociceptive, analgesic, antihypertensive, sedative, antidepressant, neuro protective and gastro protective properties. More recently, researchers have looked at the individual terpenes in essential oils, to understand which terpenoids might be contributing to their overall biological and medical properties. Terpenes in essential oils can either exert their individual effects in the oil or they can operate synergistically or agonistically with other oil constituents.

[0035] In Cannabis plants, such as C. sativa, more than 100 terpenes have been identified. Monoterpenes and sesquiterpenes are responsible for most of the odor and flavor properties of C. sativa, meaning that variation in terpene content is an important differentiator between cultivars. Therefore, there has long been interest from breeders in creating cultivars with particular terpene profiles. Further, there is a growing body of preliminary evidence that terpenes play a role in the various effects of C. sativa on humans, either directly or by modulating the effect of the cannabinoids, implying that medical C. sativa breeding likely will include terpene targets.

[0036] Given the important role of terpenes in plants, there is a need for methodologies to reliably identify plants that have desired terpene production profiles (used interchangeably herein with terpene profiles) for agricultural, industrial or medicinal use. The terms “terpene (production) profile,” “cannabinoid (production) profile,” “flavonoid (production) profile,” as used herein, refers to the types and amounts of terpenes, cannabinoids or flavonoids, respectively, in a plant cultivar, and can also include ratios of the relative abundance of two or more terpenes, cannabinoids or flavonoids, respectively.

[0037] Terpene synthases (TPSs) are the key enzymes responsible for the biosynthesis of terpenes. Provided herein are molecular markers that permit reliable identification and/or quantitation of the TPS gene profile of a plant cultivar, thereby permitting the identification and selection of plants for use in methods of genetic modification, methods of screening, and methods of use in breeding, crop cultivating, therapeutic methods and other methods as provided herein.

### Terpene Synthases

[0038] The terpene synthase (TPS) family is a family of genes that encodes enzymes that use similar substrates and generate similar products but have diverged in different lineages to provide a wide variety of terpenes and mixtures of terpenes. Some estimates suggest that more than 25,000 terpene structures may exist in plants. Analysis of the several plant genomes that have been sequenced and annotated indicates that, with the exception of the moss Physcomitrella patens, which has a single functional TPS gene, the TPS gene family is a mid-size family, with gene numbers ranging from approximately 20 to 150 in sequenced plant genomes.

[0039] Isopentenyl diphosphate (IPP) is the common precursor of all terpenes. IPP is isomerized to give dimethylallyl pyrophosphate (DMAPP). DMAPP either serves as the substrate for hemiterpene biosynthesis or fuses with one IPP unit to form geranyl diphosphate (GPP). The condensation of one GPP molecule with one IPP molecule gives farnesyl diphosphate (FPP), and the condensation of one FPP molecule with one IPP molecule will give geranylgeranyl diphosphate (GGPP). GPP, FPP and GGPP are the precursors for monoterpenes, sesquiterpenes and diterpenes, respectively. While these prenyl diphosphates in the trans -configuration have been believed to be the ubiquitous natural substrates for terpene synthases, recent studies showed that two prenyl diphosphates in the cis-configuration, neryl diphosphate (NPP) and Z,Z-FPP, are also the naturally occurring substrates of terpene synthases. Isoprene synthase, monoterpene synthases, sesquiterpene synthases, and diterpene synthases convert DMAPP, GPP (or NPP), FPP (or Z,Z-FPP), and GGPP to isoprene, monoterpenes, sesquiterpenes and diterpenes, respectively.

[0040] Based on the reaction mechanism and products formed, plant TPSs can be classified into two groups: Class I and Class II. CPS is a representative of class II TPSs: it catalyzes the formation of CPP through protonation-induced cyclization of GGPP. However, most known plant TPSs are Class I TPSs. In the initial step of the enzymatic reactions catalyzed by Class I TPSs, the prenyl diphosphate is ionized and carbocation intermediates are formed.

[0041] A striking feature of class I TPS enzymes is that, because of the stochastic nature of bond rearrangements that follow the creation of the unusual carbocation intermediates, a single TPS enzyme using a single substrate often gives rise to multiple products. The central feature of this evolutionary plasticity is that change of just a single amino acid in the active site can lead to a different product profile. Most terpenes are secondary metabolites whose synthesis evolved in response to selection for increased fitness for some ecological niche. Consistent with the need (for terpene production profiles of a plant cultivar, e.g.) to be environmentally adaptive, the TPS family has evolved such that new TPS with differing product profiles can be derived from existing enzymes by changes to just a few amino acids.

[0042] Angiosperms, of which Cannabis is an example, tend to have moderately large families of these enzymes, with both divergent and convergent evolution taking place. Some of these TPS enzymes appear to be a result of recent duplications, i.e., they are paralogs of each other. Other TPS enzymes can be quite distant from each other: for example, there is a common “terpenoid synthase fold,” but sequence divergence across the family can be very high, just staying within the constraints of maintaining an overall fold and basic configuration of the active site.

[0043] Generally, the product profile of a given TPS enzyme cannot be determined from sequence similarity with other TPS enzymes. For example, two paralogous diterpene synthases in Norway spruce (Picea abies), isopimaradiene synthase and levopimaradiene/abietadiene synthase, although 91% identical at the amino acid level, differ in their terpene product profiles: one is a single-product enzyme, whereas the other is a multiproduct enzyme that forms completely different products. In addition, a one-amino acid mutation was found to switch the levopimaradiene/abietadiene synthase into producing isopimaradiene and sandaracopimaradiene and none of its normal products. Four mutations were sufficient to reciprocally reverse the product profiles for both of these paralogous enzymes, while maintaining catalytic efficiencies similar to the wild-type enzymes (Keeling et al., Proc. Natl. Acad. Sci. USA, 105(3):1085-1090 (2008).

[0044] Thus, given the widely differing terpene profiles of the TPS enzymes, even when there is a relatively high degree of overall sequence identity, there is a need to reliably identify the individual TPS genes that are present in the TPS gene profile of a plant cultivar. The methods provided herein are based on primer sets that amplify unique subsequences, such as exons or portions thereof, within each TPS gene, thereby providing a higher order differentiation that permits sensitive detection and/or quantification of each TPS gene in the plant cultivar, regardless of the overall sequence identity between the TPS genes.

[0045] Any terpene synthase, or combinations of terpene synthases, are contemplated for analysis and/or applications/uses according to the methods and compositions provided herein. In embodiments, terpene synthases contemplated herein for the compositions and methods of analyses/applications/uses include terpene synthases that produce, singly or in combinations of two or mor terpene synthases, one or more terpenes selected from among α-Bisabolol, endo-Borneol, Camphene, Camphor, 3-Carene, Caryophyllene, Caryophyllene Oxide, α-Cedrene, Cedrol, Citronellol, Eucalyptol (1,8 Cineole), α-Farnesene, β-Farnesene, Fenchol, Fenchone, Geraniol, Geranyl Acetate, Guaiol, Humulene, Isoborneol, Isopulegol, D-Limonene, Linalool, Menthol, β-Myrcene, Nerol, trans-Nerolidol, cis-Nerolidol, trans-Ocimene, cis-Ocimene, α-Phellandrene, Phytol 1, Phytol 2, α-Pinene, β-Pinene, Pulegone, Sabinene, Sabinene Hydrate, α-Terpinene, γ-Terpinene, α-Terpineol, Terpinolene, Valencene, γ-Elemene, Z-Ocimene, E-Ocimene, α-Thujone, Thujene, γ-Muurolene, 2-Norpinene, α-Santalene, α-Selinene, Germacrene D, Eudesma-3,7(11)-diene, δ-Cadinol, trans-α-Beramotene, trans-2-pinanol, p-cymen-8-ol, Sativene, Cyclosativene, α-guaiene, γ-gurjunene, α-bulnesene, Bulnesol, α-eudesmol, β-eudesmol, Hedycaryol, γ-eudesmol, Alloaromadendrene, p-cymene, α-Copaene, β-Elemene, α-Cubebene, Linalyl acetate, Bornyl acetate, Heptacosane, Tricosane, S-Limonene, (-)-Thujopsene, Hashenene 5,5-dimethyl-1-vinylbicyclo[2.1.1]hexane, (-)-englerin A and Artemisinin.

[0046] In certain embodiments, the one or more terpene synthases are selected from among those designated as TPS11, TPS11-like, TPS12, TPS12-like, TPS13, TPS13-like, TPS13-like2, TPS14, TPS15, TPS16, TPS17, TPS18, TPS19, TPS1, TPS20, TPS23, TPS24, TPS2, TPS30, TPS30-like, TPS32, TPS33, TPS36, TPS37, TPS38, TPS39, TPS3, TPS40, TPS41, TPS42, TPS43, TPS44, TPS45, TPS46, TPS47, TPS48, TPS49, TPS4, TPS4-like, TPS50, TPS51, TPS52, TPS53, TPS54, TPS55, TPS56, TPS57, TPS58, TPS59, TPS5, TPS5, TPS60, TPS61, TPS62, TPS63, TPS64, TPS6, TPS6-like, TPS7, TPS8, TPS8, TPS8-like, TPS9, TPS9, TPS9-like and TPS9-like2. In certain embodiments, the one or more terpene synthases are selected from among those designated as TPS11JL, TPS11-likeJL, TPS12JL, TPS12-likeJL, TPS13JL, TPS13-likeJL, TPS13-like2JL, TPS14JL, TPS15JL, TPS16JL, TPS17JL, TPS18JL, TPS19JL, TPS1JL, TPS20JL, TPS23JL, TPS24JL, TPS2JL, TPS30JL, TPS30-likeJL, TPS32JL, TPS33JL, TPS36JL, TPS37JL, TPS38JL, TPS39JL, TPS3JL, TPS40JL, TPS41JL, TPS42JL, TPS43JL, TPS44JL, TPS45JL, TPS46JL, TPS47JL, TPS48JL, TPS49JL, TPS4JL, TPS4-likeJL, TPS50JL, TPS51JL, TPS52JL, TPS53JL, TPS54JL, TPS55JL, TPS56JL, TPS57JL, TPS58JL, TPS59JL, TPS5JL, TPS5JL, TPS60JL, TPS61JL, TPS62JL, TPS63JL, TPS64JL, TPS6JL, TPS6-likeJL, TPS7JL, TPS8JL, TPS8JL, TPS8-likeJL, TPS9JL, TPS9JL, TPS9-likeJL and TPS9-like2JL.

[0047] FIG. 1 provides certain mRNA coding sequences, genomic sequences (for Accession No. KY624367, genomic sequence fof CsTPS30PK that is analyzed using primer group 3 is provided) or scaffold sequences (For Accession No. KY624371, scaffold sequence that is analyzed using primer group 19 is provided) of terpene synthases that can be analyzed using the compositions and methods provided herein. Certain sequences encoding examples of terpene synthases that an be analyzed using the compositions and methods provided herein are set forth in SEQ ID NOS:1339-1397).

[0048] It is understood that for any of the terpene synthases described herein for compositions and methods of analyses/applications/uses as provided herein, suitable conservative substitutions of amino acids are known to those of skill in this art and can generally be made without altering the biological activity of the resulting terpene synthases. Those of skill in the art recognize that, in general, single amino acid substitutions in non-essential regions of a polypeptide do not substantially alter biological activity (see, e.g., Watson et al. Molecular Biology of the Gene, 4th Edition, 1987, The Benjamin/Cummings Pub. co., p.224). Such substitutions can be made, for example, in accordance with those set forth in TABLE A as follows:

TABLE A

| | |
|---|---|
| Original residue | Conservative substitution |
| Ala (A) | Gly; Ser |
| Arg (R) | Lys |
| Asn (N) | Gln; His |
| Cys (C) | Ser |
| Gln (Q) | Asn |
| Glu (E) | Asp |
| Gly (G) | Ala; Pro |
| His (H) | Asn; Gln |
| Ile (I) | Leu; Val |
| Leu (L) | Ile; Val |
| Lys (K) | Arg; Gln; Glu |
| Met (M) | Leu; Tyr; Ile |
| Phe (F) | Met; Leu; Tyr |
| Ser (S) | Thr |
| Thr (T) | Ser |
| Trp (W) | Tyr |
| Tyr (Y) | Trp; Phe |
| Val (V) | Ile; Leu |

[0049] Other substitutions also are permissible, including more than one conservative substitution and, in some instances, such conservative substitutions in active sites of the enzyme, such as a terpene synthase. The substaitutions can be determined empirically or in accord with known conservative substitutions.

[0050] In embodiments of the methods provided herein, the identification of the presence or absence of a terpene synthase gene of interest is by a method selected from among one or more of high-resolution melting (HRM), quantitative PCR (qPCR), loop-mediated isothermal amplification (LAMP), restriction endonuclease digestion, gel electrophoresis and sequencing. Polynucleotide primer pairs for amplifying subsequences of terpene synthase genes of interest, e.g., by HRM, qPCR, etc. (to select plant cultivars expressing terpene synthase gene(s) that produce a desired energetic, anti-nociceptive and/or insecticidal terpene profile can be selected as a subset (one or more polyncleotide primer pairs) of the polynucleotide primer pairs (F: forward; R: reverse) listed in Table B below:

TABLE B

| Gene name | Exon # | Primer Name | Primer Seq (5′ -> 3′) | Seq ID# |
|---|---|---|---|---|
| TPS11JL | 1 | TPS11JL-1F | ATATTCAAAGATCAACCAGCAGC | SEQ ID NO: 1 |
| TPS11JL | 1 | TPS11JL-1R | TGTGGGTTTGTAGTTGCCTGAT | SEQ ID NO: 2 |
| TPS11JL | 2a | TPS11JL-2aF | AGCTATGGGAAAAGAATCAATGAGC | SEQ ID NO: 3 |
| TPS11JL | 2a | TPS11JL-2aR | GAGTTTGAAATGAAGAGCAGTGG | SEQ ID NO: 4 |
| TPS11JL | 2b | TPS11JL-2bF | GAGGCTGAAAATCCTTTAGTTAAGC | SEQ ID NO: 5 |
| TPS11JL | 2b | TPS11JL-2bR | ACAGGACTGAATCCATATTGTCTAAGG | SEQ ID NO: 6 |
| TPS11JL | 3a | TPS11JL-3aF | AGATGAAGCAAGAGATTTCACAACC | SEQ ID NO: 7 |
| TPS11JL | 3a | TPS11JL-3aR | AATGGAGTGGAAGATCCAAGGC | SEQ ID NO: 8 |
| TPS11JL | 3b | TPS11JL-3bF | ATGCCTTGGATCTTCCACTCC | SEQ ID NO: 9 |
| TPS11JL | 3b | TPS11JL-3bR | CTTTTTGGTATGCTGACTGAACG | SEQ ID NO: 10 |
| TPS11JL | 4 | TPS11JL-4F | CATTTGCTAGAGACAGAGTAGTGG | SEQ ID NO: 11 |
| TPS11JL | 4 | TPS11JL-4R | GCTGAAGCTCATCTAGTGTACC | SEQ ID NO: 12 |
| TPS11JL | 5 | TPS11JL-5F | TGAACTGGATCAGCTACCCG | SEQ ID NO: 13 |
| TPS11JL | 5 | TPS11JL-5R | GTGTGAATCCCATTTTCTTTGAGG | SEQ ID NO: 14 |
| TPS11JL | 6 | TPS11JL-6F | GTTGGGTGATCTGTGTAAATGC | SEQ ID NO: 15 |
| TPS11JL | 6 | TPS11JL-6R | CTGAGACACGTAAAATGGTTGG | SEQ ID NO: 16 |
| TPS11JL | 7 | TPS11JL-7F | TGCTACATGCGTGAAAAGGG | SEQ ID NO: 17 |
| TPS11JL | 7 | TPS11JL-7R | TGTGGTACATCTCCATTGCTCC | SEQ ID NO: 18 |
| TPS11-like1JL | 1 | TPS11-like1JL-1F | ATGTGCTGTGGTCAATAGTTCT | SEQ ID NO: 19 |
| TPS11-like1JL | 1 | TPS11-like1JL-1R | AAAGACCAAATGGAGGGCTCA | SEQ ID NO: 20 |
| TPS11-like1JL | 2 | TPS11-like1JL-2F | ACAGGTCGAGTCAAAGAATTGG | SEQ ID NO: 21 |
| TPS11-like1JL | 2 | TPS11-like1JL-2R | GCCATGTTGACGTAGAAGCC | SEQ ID NO: 22 |
| TPS11-like1JL | 3a | TPS11-like1JL-3aF | AGGAAGAGATAGGAAAAATCAAAGCG | SEQ ID NO: 23 |
| TPS11-like1JL | 3a | TPS11-like1JL-3aR | GCGTCGATGAACCACTTAGC | SEQ ID NO: 24 |
| TPS11-like1JL | 3b | TPS11-like1JL-3bF | TAAGGAAGAGATAGGAAAAATCAAAGC | SEQ ID NO: 25 |
| TPS11-like1JL | 3b | TPS11-like1JL-3bR | TTGTAGTCCTCCGATGAAGTGG | SEQ ID NO: 26 |
| TPS11-like1JL | 4 | TPS11-like1JL-4F | TGGAGGCATACTAAACTTGGGG | SEQ ID NO: 27 |
| TPS11-like1JL | 4 | TPS11-like1JL-4R | AAGCTCTAATTCATCCAATGTTCC | SEQ ID NO: 28 |
| TPS11-like1JL | 5 | TPS11-like1JL-5F | GATGGGATATGGAAATGATAAATGAGT | SEQ ID NO: 29 |
| TPS11-like1JL | 5 | TPS11-like1JL-5R | TGTTGATGGAGATGTGTTGGTCT | SEQ ID NO: 30 |
| TPS11-like1JL | 6 | TPS11-like1JL-6F | GGATTTCAGTGGGAGCACCG | SEQ ID NO: 31 |
| TPS11-like1JL | 6 | TPS11-like1JL-6R | GCACTATGACGAATTATGGCGG | SEQ ID NO: 32 |
| TPS11-like1JL | 7 | TPS11-like1JL-7F | TGAAAAGAGGTGATGCTCCG | SEQ ID NO: 33 |
| TPS11-like1JL | 7 | TPS11-like1JL-7R | CCATGCTGATACATGAAAAATCCC | SEQ ID NO: 34 |
| TPS12JL | 1 | TPS12JL-1F | ATCCTTAATACTACAAAATTAGCAAGAGC | SEQ ID NO: 35 |
| TPS12JL | 1 | TPS12JL-1R | AATGTAATCAAAAGACCAAATGGGAGG | SEQ ID NO: 36 |
| TPS12JL | 2 | TPS12JL-2F | AGTAGATTGAATGAGCTAGAGGC | SEQ ID NO: 37 |
| TPS12JL | 2 | TPS12JL-2R | AATTCGAGAGCTGTGGCG | SEQ ID NO: 38 |
| TPS12JL | 3 | TPS12JL-3F | AAGCAAGTTCAAGGCAAGAACG | SEQ ID NO: 39 |
| TPS12JL | 3 | TPS12JL-3R | GATGGTTTGTTTCGCTCCATCG | SEQ ID NO: 40 |
| TPS12JL | 4 | TPS12JL-4F | GGAGTGTTTCTTATGGACTGTGG | SEQ ID NO: 41 |
| TPS12JL | 4 | TPS12JL-4R | GAAAAGCTCTAATTCCTCCAATGTTCC | SEQ ID NO: 42 |
| TPS12JL | 5 | TPS12JL-5F | TGTGAAAGCAATGGATGATTTACC | SEQ ID NO: 43 |
| TPS12JL | 5 | TPS12JL-5R | AATTTTGGTGTCCTAACACATCG | SEQ ID NO: 44 |
| TPS12JL | 6a | TPS12JL-6aF | TCTGTAAACATCAATTACAAGAGGC | SEQ ID NO: 45 |
| TPS12JL | 6a | TPS12JL-6aR | TCGGTCCTGATACCGAAATCC | SEQ ID NO: 46 |
| TPS12JL | 6b | TPS12JL-6bF | ATGGATTTCGGTATCAGGACCG | SEQ ID NO: 47 |
| TPS12JL | 6b | TPS12JL-6bR | CATCTGTAAGTCGTAGAATCATGG | SEQ ID NO: 48 |
| TPS12JL | 7 | TPS12JL-7F | TAATGAAGATGAAAATATGGACTCTCC | SEQ ID NO: 49 |
| TPS12JL | 7 | TPS12JL-7R | GATAAACTATCCTGAGAAGCATGTCC | SEQ ID NO: 50 |
| TPS12-likeJL | 1a | TPS12-likeJL-1aF | TGTCCACTCAAATCTTAGCATCA | SEQ ID NO: 51 |
| TPS12-likeJL | 1a | TPS12-likeJL-1aR | TGAAATGTTTTTGTAGGACGAACA | SEQ ID NO: 52 |
| TPS12-likeJL | 1b | TPS12-likeJL-1bF | CAACCCAAATAAAATTGTTCGTCC | SEQ ID NO: 53 |
| TPS12-likeJL | 1b | TPS12-likeJL-1bR | TTGTGAAATGTTGTAATGTAAGAATCG | SEQ ID NO: 54 |
| TPS12-likeJL | 2a | TPS12-likeJL-2aF | TGTCAACAACAAAAGGTTGAGG | SEQ ID NO: 55 |
| TPS12-likeJL | 2a | TPS12-likeJL-2aR | AGTCTAAACCGTAAAGAAACATGG | SEQ ID NO: 56 |
| TPS12-likeJL | 2b | TPS12-likeJL-2bF | AAAGGTTGAGGAATTAAAGGAAGTGG | SEQ ID NO: 57 |
| TPS12-likeJL | 2b | TPS12-likeJL-2bR | TCAAAATGATAAGACAATCCCAAACG | SEQ ID NO: 58 |
| TPS12-likeJL | 3a | TPS12-likeJL-3aF | TGAAAAATTCAAAGACGAGGATGGG | SEQ ID NO: 59 |
| TPS12-likeJL | 3a | TPS12-likeJL-3aR | AAGGGCCTCTCTAGGGCTCG | SEQ ID NO: 60 |
| TPS12-likeJL | 3b | TPS12-likeJL-3bF | ACACTTAACCGAGTTTTTGGC | SEQ ID NO: 61 |
| TPS12-likeJL | 3b | TPS12-likeJL-3bR | TGCTGACTTCACAAAGCTCC | SEQ ID NO: 62 |
| TPS12-likeJL | 4 | TPS12-likeJL-4F | TGCAAGAGATAGGATTGTGGAAT | SEQ ID NO: 63 |
| TPS12-likeJL | 4 | TPS12-likeJL-4R | GCATGAGTTAGGATCTCAAGTTCTTC | SEQ ID NO: 64 |
| TPS12-likeJL | 5 | TPS12-likeJL-5F | TGGGATATAAATTGTGTGGATAAACTG | SEQ ID NO: 65 |
| TPS12-likeJL | 5 | TPS12-likeJL-5R | GCACTTGCTCAAACTCTTCATAACAA | SEQ ID NO: 66 |
| TPS12-likeJL | 6a | TPS12-likeJL-6aF | TGTTTGCATAGAGGACTCATCCC | SEQ ID NO: 67 |
| TPS12-likeJL | 6a | TPS12-likeJL-6aR | AGTTTTCATTCCAACCAAAGAGC | SEQ ID NO: 68 |
| TPS12-likeJL | 6b | TPS12-likeJL-6bF | TTTGGATGAAGCTCGATGTTTGC | SEQ ID NO: 69 |
| TPS12-likeJL | 6b | TPS12-likeJL-6bR | AGTAACAGATGCTCTAATAATCTTTCG | SEQ ID NO: 70 |
| TPS12-likeJL | 7a | TPS12-likeJL-7aF | ATGAGGAACATTCAGCAGTGG | SEQ ID NO: 71 |
| TPS12-likeJL | 7a | TPS12-likeJL-7aR | AGCACGAAGTAATATAGGTGAAGC | SEQ ID NO: 72 |
| TPS12-likeJL | 7b | TPS12-likeJL-7bF | ATGGCGTTTGTGAAGAGGAAGC | SEQ ID NO: 73 |
| TPS12-likeJL | 7b | TPS12-likeJL-7bR | AATTGGATGAATAAGCAAAGCAGC | SEQ ID NO: 74 |
| TPS13JL | 1 | TPS13JL-1F | TCCTTAGTTCTACAAAATTAGCAAGAGC | SEQ ID NO: 75 |
| TPS13JL | 1 | TPS13JL-1R | GTAATCAAAAGACCAAATGGGAGG | SEQ ID NO: 76 |
| TPS13JL | 2 | TPS13JL-2F | ACAAGTAGATTGAATGAGCTAGAAGC | SEQ ID NO: 77 |
| TPS13JL | 2 | TPS13JL-2R | TCATAACCATGTTGTCGTAGAAGC | SEQ ID NO: 78 |
| TPS13JL | 3a | TPS13JL-3aF | GTTCAAGGCAAGAAGGAGTAGC | SEQ ID NO: 79 |
| TPS13JL | 3a | TPS13JL-3aR | TTTGCTCCATCGTCATCGTCG | SEQ ID NO: 80 |
| TPS13JL | 3b | TPS13JL-3bF | ATTATGCAGCGACGATGACG | SEQ ID NO: 81 |
| TPS13JL | 3b | TPS13JL-3bR | CCTTGCTTCTGATCTTGTTATTCTCC | SEQ ID NO: 82 |
| TPS13JL | 4 | TPS13JL-4F | TGGAGTGTTTCTTATGGACTGTGG | SEQ ID NO: 83 |
| TPS13JL | 4 | TPS13JL-4R | CTCTCAACAGCATTAGTGAAAAGC | SEQ ID NO: 84 |
| TPS13JL | 5 | TPS13JL-5F | TGTGAAAGCAATGGATGATTTACC | SEQ ID NO: 85 |
| TPS13JL | 5 | TPS13JL-5R | AATTTTGGTCTCCTAACACATCG | SEQ ID NO: 86 |
| TPS13JL | 6 | TPS13JL-6F | GGCGAAATGGTTTCACAGTGG | SEQ ID NO: 87 |
| TPS13JL | 6 | TPS13JL-6R | CGTAGAATCATGGATGCGTGG | SEQ ID NO: 88 |
| TPS13JL | 7 | TPS13JL-7F | AAATAATGAAGATGAAAATATGGACTCTCC | SEQ ID NO: 89 |
| TPS13JL | 7 | TPS13JL-7R | GATAAACTATCCTGAGAAGCATGTCC | SEQ ID NO: 90 |
| TPS13-like1JL | 1 | TPS13-like1JL-1F | AAACTATCAACCTTCACTTTGGC | SEQ ID NO: 91 |
| TPS13-like1JL | 1 | TPS13-like1JL-1R | TTCCTCTTTTGCTCTCTTCACC | SEQ ID NO: 92 |
| TPS13-like1JL | 2 | TPS13-like1JL-2F | TGCAAAGACTTGGAATCTCTTATCAC | SEQ ID NO: 93 |
| TPS13-like1JL | 2 | TPS13-like1JL-2R | GAGACACCGGATAACCATGTTG | SEQ ID NO: 94 |
| TPS13-like1JL | 3 | TPS13-like1JL-3F | GAGGCAATTTTATGGTGTGTACC | SEQ ID NO: 95 |
| TPS13-like1JL | 3 | TPS13-like1JL-3R | TCTTTGTTGTTTCTCTTGTCTCTTCC | SEQ ID NO: 96 |
| TPS13-like1JL | 4a | TPS13-like1JL-4aF | TGGGAAAGCACTGGTATGGG | SEQ ID NO: 97 |
| TPS13-like1JL | 4a | TPS13-like1JL-4aR | AGCTCCAATTCATCTAGTGTACC | SEQ ID NO: 98 |
| TPS13-like1JL | 4b | TPS13-like1JL-4bF | GTGGGAAAGCACTGGTATGGG | SEQ ID NO: 99 |
| TPS13-like1JL | 4b | TPS13-like1JL-4bR | AATTTTTGTAATGTGGCTCAAATGC | SEQ ID NO: 100 |
| TPS13-like1JL | 5 | TPS13-like1JL-5F | TGGGATATTAGTGCTATGGATGGG | SEQ ID NO: 101 |
| TPS13-like1JL | 5 | TPS13-like1JL-5R | TTCTGAAGGAATTTTATTATATGGAGGC | SEQ ID NO: 102 |
| TPS13-like1JL | 6 | TPS13-like1JL-6F | TAGTGAATCCAAACAAGGAAGATGC | SEQ ID NO: 103 |
| TPS13-like1JL | 6 | TPS13-like1JL-6R | TCATCTGTAAGACGTAAAATCATCG | SEQ ID NO: 104 |
| TPS13-like1JL | 7 | TPS13-like1JL-7F | GATGGCGTGTTTGAAGAAGAAGC | SEQ ID NO: 105 |
| TPS13-like1JL | 7 | TPS13-like1JL-7R | TGATAGTACATGATCTTTTGTTTGGC | SEQ ID NO: 106 |
| TPS13-like2JL | 1 | TPS13-like2JL-1F | TTCTCGAAGATCAGCAAACTATCAAC | SEQ ID NO: 107 |
| TPS13-like2JL | 1 | TPS13-like2JL-1R | TTGAAAGGGGTAGAAAGTGATTGTA | SEQ ID NO: 108 |
| TPS13-like2JL | 2a | TPS13-like2JL-2aF | AGGTAAGAGTAATGGTGAAGAGAGC | SEQ ID NO: 109 |
| TPS13-like2JL | 2a | TPS13-like2JL-2aR | CATTCTCAAAGTGGTAAGAGATTCC | SEQ ID NO: 110 |
| TPS13-like2JL | 2b | TPS13-like2JL-2bF | GAGCAAAAGAGGAGGAGAAGCC | SEQ ID NO: 111 |
| TPS13-like2JL | 2b | TPS13-like2JL-2bR | GGCATAGACATTTTTGTTGGTGTTGC | SEQ ID NO: 112 |
| TPS13-like2JL | 3 | TPS13-like2JL-3F | GAGGCAATTTTATGGTGTCTTCC | SEQ ID NO: 113 |
| TPS13-like2JL | 3 | TPS13-like2JL-3R | TGTTGTGTGTCTTGTCTCTTCC | SEQ ID NO: 114 |
| TPS13-like2JL | 4 | TPS13-like2JL-4F | TGGGAAAGCACTGATATGGG | SEQ ID NO: 115 |
| TPS13-like2JL | 4 | TPS13-like2JL-4R | AGCTCCAATTCATCTAGTGTACC | SEQ ID NO: 116 |
| TPS13-like2JL | 5 | TPS13-like2JL-5F | TGGGATATTAGTGCTATGGATGGG | SEQ ID NO: 117 |
| TPS13-like2JL | 5 | TPS13-like2JL-5R | TTCTGAAGGAATTTTATTATATGGAGGC | SEQ ID NO: 118 |
| TPS13-like2JL | 6 | TPS13-like2JL-6F | AGCTTTGAAGAGTACATTGAGAATGC | SEQ ID NO: 119 |
| TPS13-like2JL | 6 | TPS13-like2JL-6R | ATCATCTGTAAGTCGTAAAATCATCG | SEQ ID NO: 120 |
| TPS13-like2JL | 7a | TPS13-like2JL-7aF | GGCGATGTTCCCAAATCAATCC | SEQ ID NO: 121 |
| TPS13-like2JL | 7a | TPS13-like2JL-7aR | AACATTGGAGAGTAGTCATCACC | SEQ ID NO: 122 |
| TPS13-like2JL | 7b | TPS13-like2JL-7bF | GATGATGATGGTGATGACTACTCTCC | SEQ ID NO: 123 |
| TPS13-like2JL | 7b | TPS13-like2JL-7bR | GATAGTACATGATCTTTTGTATGGCG | SEQ ID NO: 124 |
| TPS13PK | 2 | TPS13PK-2F | GATCAGCAAACTATCAACCCCC | SEQ ID NO: 125 |
| TPS13PK | 2 | TPS13PK-2R | TCACCATCACTCTTACTTCTTCC | SEQ ID NO: 126 |
| TPS13PK | 3 | TPS13PK-3F | ACTTGGAATCTCTTATCACTTTGAGG | SEQ ID NO: 127 |
| TPS13PK | 3 | TPS13PK-3R | AGAGAATTGGCATACACATTATTATTGG | SEQ ID NO: 128 |
| TPS13PK | 4 | TPS13PK-4F | GAGGCAATTTTATGGTGTGTACC | SEQ ID NO: 129 |
| TPS13PK | 4 | TPS13PK-4R | TTTCTCTTGTCTCTTCCAAAATACC | SEQ ID NO: 130 |
| TPS13PK | 5a | TPS13PK-5aF | TGGTGGGAAAGCACTGATATGG | SEQ ID NO: 131 |
| TPS13PK | 5a | TPS13PK-5aR | AATGTGGCTCAAATGCAACTCC | SEQ ID NO: 132 |
| TPS13PK | 5b | TPS13PK-5bF | TGGGAAAGCACTGATATGGG | SEQ ID NO: 133 |
| TPS13PK | 5b | TPS13PK-5bR | AGCTCCAATTCATCTAGTGTACC | SEQ ID NO: 134 |
| TPS13PK | 6 | TPS13PK-6F | TGGGATATTAGTGCTATGGATGGG | SEQ ID NO: 135 |
| TPS13PK | 6 | TPS13PK-6R | TTCTGAAGGAATTTTATTATATGGAGGC | SEQ ID NO: 136 |
| TPS13PK | 7a | TPS13PK-7aF | GCTTTGAAGAGTACATTGAGAATGC | SEQ ID NO: 137 |
| TPS13PK | 7a | TPS13PK-7aR | CGATGAATGTCGTATTATGGTAGGG | SEQ ID NO: 138 |
| TPS13PK | 7b | TPS13PK-7bF | GTGAATCCAAACAAGGAAAATGCC | SEQ ID NO: 139 |
| TPS13PK | 7b | TPS13PK-7bR | TGAAGTTCCCATATCATCTTTAAGTCG | SEQ ID NO: 140 |
| TPS13PK | 8a | TPS13PK-8aF | TGAATTGAAAAGAGGCGATGTTCC | SEQ ID NO: 141 |
| TPS13PK | 8a | TPS13PK-8aR | ACATTGGAGAGTAGTCATCACC | SEQ ID NO: 142 |
| TPS13PK | 8b | TPS13PK-8bF | TGGTATATCTGAAGAGGAAGCTCG | SEQ ID NO: 143 |
| TPS13PK | 8b | TPS13PK-8bR | AGAACATTGGAGAGTAGTCATCACC | SEQ ID NO: 144 |
| TPS14CT | 1 | TPS14CT-1F | GCATAGCTTTTCACCAATTTGC | SEQ ID NO: 145 |
| TPS14CT | 1 | TPS14CT-1R | GGGAGGGATGATGATGAAGCA | SEQ ID NO: 146 |
| TPS14CT | 2 | TPS14CT-2F | CAATGTACTGTGGTCGATAACCC | SEQ ID NO: 147 |
| TPS14CT | 2 | TPS14CT-2R | GAACAAAATCAAAAGACCAAATGGG | SEQ ID NO: 148 |
| TPS14CT | 3 | TPS14CT-3F | TGGAGAAAGATGTGAAAAGGATGC | SEQ ID NO: 149 |
| TPS14CT | 3 | TPS14CT-3R | ATTGGCGTAGAAGCCTAAATTGG | SEQ ID NO: 150 |
| TPS14CT | 4 | TPS14CT-4F | TCACAAGACAGGAGAGTTCAAGG | SEQ ID NO: 151 |
| TPS14CT | 4 | TPS14CT-4R | TGAAGTGGCATCTCCAAAGC | SEQ ID NO: 152 |
| TPS14CT | 5a | TPS14CT-5aF | TGGTGGAAGGATTCTAAACTTGG | SEQ ID NO: 153 |
| TPS14CT | 5a | TPS14CT-5aR | CTCCAATGTTCCATAAATGTCATGC | SEQ ID NO: 154 |
| TPS14CT | 5b | TPS14CT-5bF | GCAAGTTGGAGTAAGATTTGAGC | SEQ ID NO: 155 |
| TPS14CT | 5b | TPS14CT-5bR | ATTAGTGAAAAGTTGTAGTTCCTCC | SEQ ID NO: 156 |
| TPS14CT | 7a | TPS14CT-7aF | AAGAGGCAAAATGGTTTTATAGTGG | SEQ ID NO: 157 |
| TPS14CT | 7a | TPS14CT-7aR | TTGGTAACAGGATTTGTAAAAGCG | SEQ ID NO: 158 |
| TPS14CT | 7b | TPS14CT-7bF | GGATGGTTGTCTGTGGGAGG | SEQ ID NO: 159 |
| TPS14CT | 7b | TPS14CT-7bR | TGCATGGCGAACTATGTTAGG | SEQ ID NO: 160 |
| TPS14CT | 8 | TPS14CT-8F | TGCAAAAATCTTGGTAGAGCG | SEQ ID NO: 161 |
| TPS14CT | 8 | TPS14CT-8R | TGGGGATAGGAGTAATAATCAACCC | SEQ ID NO: 162 |
| TPS14JL | 1 | TPS14JL-1F | ATATTCAAGTCTTAGCTTCATCTCAATTA | SEQ ID NO: 163 |
| TPS14JL | 1 | TPS14JL-1R | ATCGCCCCAAATAGAAGGGTG | SEQ ID NO: 164 |
| TPS14JL | 2 | TPS14JL-2F | TTTGAGAGTGAAATTGAGAAATTGTTGG | SEQ ID NO: 165 |
| TPS14JL | 2 | TPS14JL-2R | TAAATCCATGTTGTCTTAATAATCTAAACC | SEQ ID NO: 166 |
| TPS14JL | 3 | TPS14JL-3F | GGTTTGCTTAGCTTGTATGAGGC | SEQ ID NO: 167 |
| TPS14JL | 3 | TPS14JL-3R | GCCTCTCTATGGTCTTTCTTAGAGG | SEQ ID NO: 168 |
| TPS14JL | 4 | TPS14JL-4F | TGGTGGAAAGAGCATGAGTTTGC | SEQ ID NO: 169 |
| TPS14JL | 4 | TPS14JL-4R | ATTGAGGCTAATGCAATGACTTTGG | SEQ ID NO: 170 |
| TPS14JL | 6 | TPS14JL-6F | AGCTCGATGGTTGAGTGAAGG | SEQ ID NO: 171 |
| TPS14JL | 6 | TPS14JL-6R | CTAGCAAGGAGAGTGGAAGC | SEQ ID NO: 172 |
| TPS14JL | 7a | TPS14JL-7aF | TGAGCAAAAGAGAAATCACATACC | SEQ ID NO: 173 |
| TPS14JL | 7a | TPS14JL-7aR | TTTCTTTCCAGTGGGTGTCC | SEQ ID NO: 174 |
| TPS14JL | 7b | TPS14JL-7bF | TGAAACAATATGGGGTATCAGAGG | SEQ ID NO: 175 |
| TPS14JL | 7b | TPS14JL-7bR | AATGCTTTCTTTGAGCACTTTTCC | SEQ ID NO: 176 |
| TPS15CT | 1a | TPS15CT-1aF | GCATTGTATGGCTGTTCACC | SEQ ID NO: 177 |
| TPS15CT | 1a | TPS15CT-1aR | TCGAAAGACCAAATCGGAGG | SEQ ID NO: 178 |
| TPS15CT | 1b | TPS15CT-1bF | TCACACCAAAAACATCTATTAGTCC | SEQ ID NO: 179 |
| TPS15CT | 1b | TPS15CT-1bR | CAAATCGGAGGTTCATAATTGGC | SEQ ID NO: 180 |
| TPS15CT | 2a | TPS15CT-2aF | AAGAAAGAAGTGACAAGAATGCTCC | SEQ ID NO: 181 |
| TPS15CT | 2a | TPS15CT-2aR | ACTGTATAGCCATGTTGGCG | SEQ ID NO: 182 |
| TPS15CT | 2b | TPS15CT-2bF | GAAATTAACTCTTTAGCCCTACTCG | SEQ ID NO: 183 |
| TPS15CT | 2b | TPS15CT-2bR | AGCCTAAATTCGAGAGCAATGG | SEQ ID NO: 184 |
| TPS15CT | 3a | TPS15CT-3aF | TGCTTTCAAGGATAAGAGAGGG | SEQ ID NO: 185 |
| TPS15CT | 3a | TPS15CT-3aR | TCTTCCTCATTCTCCATTTTCTCC | SEQ ID NO: 186 |
| TPS15CT | 3b | TPS15CT-3bF | CATGGAGAAAATGGAGAATGAGG | SEQ ID NO: 187 |
| TPS15CT | 3b | TPS15CT-3bR | TCGCAAACTCGAACAAAGTCG | SEQ ID NO: 188 |
| TPS15CT | 4 | TPS15CT-4F | TTGCTAGAGATAGATTGATGGAAGC | SEQ ID NO: 189 |
| TPS15CT | 4 | TPS15CT-4R | AAAGCTCTAATTCCTCCAAAGTTCC | SEQ ID NO: 190 |
| TPS15CT | 5 | TPS15CT-5F | ACCAGATTACATGAAGATGCCTT | SEQ ID NO: 191 |
| TPS15CT | 5 | TPS15CT-5R | CTAATACATCGAACCCCATCTCA | SEQ ID NO: 192 |
| TPS15CT | 6a | TPS15CT-6aF | GGTATTATAGTGGATACCAACCAAC | SEQ ID NO: 193 |
| TPS15CT | 6a | TPS15CT-6aR | AAGCCAACCCAACTCAGTGT | SEQ ID NO: 194 |
| TPS15CT | 6b | TPS15CT-6bF | ACACTGAGTTGGGTTGGCTTT | SEQ ID NO: 195 |
| TPS15CT | 6b | TPS15CT-6bR | GTTCCTAAATCATCTGCAAGCCT | SEQ ID NO: 196 |
| TPS15CT | 7 | TPS15CT-7F | TTGAATAGAGGCGACGTTCC | SEQ ID NO: 197 |
| TPS15CT | 7 | TPS15CT-7R | TGCTGTTCTAGCCATATTTTTGC | SEQ ID NO: 198 |
| TPS16CC | 1 | TPS16CC-1F | TCTAGTCAAGTGTTAGCTTCATCTC | SEQ ID NO: 199 |
| TPS16CC | 1 | TPS16CC-1R | TTTGTTGTTGGTCGAATGATGT | SEQ ID NO: 200 |
| TPS16CC | 2 | TPS16CC-2F | AGGGACAAGTTGAAGAATTGAAAGA | SEQ ID NO: 201 |
| TPS16CC | 2 | TPS16CC-2R | CATGGTTGGAGTAGTAGTAGTGT | SEQ ID NO: 202 |
| TPS16CC | 3a | TPS16CC-3aF | GAGAGTGGTAAGTTTAAGGAAAGC | SEQ ID NO: 203 |
| TPS16CC | 3a | TPS16CC-3aR | CCTAGCATAAAGCCTCACTAGG | SEQ ID NO: 204 |
| TPS16CC | 3b | TPS16CC-3bF | GGCTCTTGCTTTCACTACCACC | SEQ ID NO: 205 |
| TPS16CC | 3b | TPS16CC-3bR | CCTCACTAGGGTTTTTCTCAAAGG | SEQ ID NO: 206 |
| TPS16CC | 4 | TPS16CC-4F | GGTGGAAAGAATTAGACTTGGC | SEQ ID NO: 207 |
| TPS16CC | 4 | TPS16CC-4R | ATGTCCCACCTGAGAATTGC | SEQ ID NO: 208 |
| TPS16CC | 5 | TPS16CC-5F | ACTTAGTCCAGATTATTTGAAGACATATT | SEQ ID NO: 209 |
| TPS16CC | 5 | TPS16CC-5R | TGCATAGTGAAGTTTGTATCTCTCT | SEQ ID NO: 210 |
| TPS16CC | 6 | TPS16CC-6F | TTGAGACCTCTTTTGTTGGAATGC | SEQ ID NO: 211 |
| TPS16CC | 6 | TPS16CC-6R | AAAATCTTTGGTTGTGTAGAGAGC | SEQ ID NO: 212 |
| TPS16CC | 7a | TPS16CC-7aF | ATGGTGTATCGGAACAAGAGG | SEQ ID NO: 213 |
| TPS16CC | 7a | TPS16CC-7aR | AACGCAGCAACACTGTCC | SEQ ID NO: 214 |
| TPS16CC | 7b | TPS16CC-7bF | AAGTGCTTGACATTATCTACAAAGAAGG | SEQ ID NO: 215 |
| TPS16CC | 7b | TPS16CC-7bR | TAATGGGATGGGATCTATAAGCAACGC | SEQ ID NO: 216 |
| TPS17JL | 1a | TPS17JL-1aF | ATGGCTTTTCACCAATTTGCTCC | SEQ ID NO: 217 |
| TPS17JL | 1a | TPS17JL-1aR | TCGTAGAACTAGGGTTATCGACC | SEQ ID NO: 218 |
| TPS17JL | 1b | TPS17JL-1bF | TTTGCTCCATCATCATCCCTCCC | SEQ ID NO: 219 |
| TPS17JL | 1b | TPS17JL-1bR | GAGGTCCATAGTTGGCTGATCTTCG | SEQ ID NO: 220 |
| TPS17JL | 2 | TPS17JL-2F | TTGAAGAAAGAAGTGACAAGAATGG | SEQ ID NO: 221 |
| TPS17JL | 2 | TPS17JL-2R | GGTAAGATATTCCAAGCCTTTGC | SEQ ID NO: 222 |
| TPS17JL | 4a | TPS17JL-4aF | TACATGGAGAAAATGGAGAATGAGG | SEQ ID NO: 223 |
| TPS17JL | 4a | TPS17JL-4aR | TGAAGCGGAAGCTCGAAAGC | SEQ ID NO: 224 |
| TPS17JL | 4b | TPS17JL-4bF | ATCACGCTTTCGAGCTTCCG | SEQ ID NO: 225 |
| TPS17JL | 4b | TPS17JL-4bR | AAATCTTCTTGGTGTGTTGATTGC | SEQ ID NO: 226 |
| TPS17JL | 5 | TPS17JL-5F | TTGCTAGAGATAGATTGATGGAAGC | SEQ ID NO: 227 |
| TPS17JL | 5 | TPS17JL-5R | AAAGCTCTAATTCCTCCAAAGTTCC | SEQ ID NO: 228 |
| TPS17JL | 6 | TPS17JL-6F | GTTACCAGATTACATGAAGATGCC | SEQ ID NO: 229 |
| TPS17JL | 6 | TPS17JL-6R | ACTAATACATCGAACCCCATCTC | SEQ ID NO: 230 |
| TPS17JL | 7 | TPS17JL-7F | AGTTGGGTTGGCTTTCAATAGG | SEQ ID NO: 231 |
| TPS17JL | 7 | TPS17JL-7R | ATGTTCCTAAATCATCTGCAAGC | SEQ ID NO: 232 |
| TPS17JL | 8 | TPS17JL-8F | TAGAGGCGACGTTCCTAAATCG | SEQ ID NO: 233 |
| TPS17JL | 8 | TPS17JL-8R | TGCTGTTCTAGCCATATTTTTGC | SEQ ID NO: 234 |
| TPS18JL | 1 | TPS18JL-1F | TCTAGTCAAGTGTTAGCTTCATCTC | SEQ ID NO: 235 |
| TPS18JL | 1 | TPS18JL-1R | TGTTGTTGGTCGAATGATGTTTTG | SEQ ID NO: 236 |
| TPS18JL | 2 | TPS18JL-2F | AAGAAGTTGTTAGGAAAGAGATATTCC | SEQ ID NO: 237 |
| TPS18JL | 2 | TPS18JL-2R | AGATGAAATGTTAAATCCATGTTGTCG | SEQ ID NO: 238 |
| TPS18JL | 3a | TPS18JL-3aF | TGAGAGTGGTAAGTTTAAGGAAAGC | SEQ ID NO: 239 |
| TPS18JL | 3a | TPS18JL-3aR | GGTGGTAGTGAAAGCAAGAGC | SEQ ID NO: 240 |
| TPS18JL | 3b | TPS18JL-3bF | GGCTCTTGCTTTCACTACCACC | SEQ ID NO: 241 |
| TPS18JL | 3b | TPS18JL-3bR | CCTCACTAGGGTTTTTCTCAAAGG | SEQ ID NO: 242 |
| TPS18JL | 3c | TPS18JL-3cF | TGAGAAAAACCCTAGTGAGGC | SEQ ID NO: 243 |
| TPS18JL | 3c | TPS18JL-3cR | TTGTAGTAGATTGAAGTCCAACTTTGC | SEQ ID NO: 244 |
| TPS18JL | 4 | TPS18JL-4F | TTAGACTTGGCAAACAAACTACC | SEQ ID NO: 245 |
| TPS18JL | 4 | TPS18JL-4R | TATGTCCCACCTGAGAATTGC | SEQ ID NO: 246 |
| TPS18JL | 5 | TPS18JL-5F | ACTTAGTCCAGATTATTTGAAGACATATTA | SEQ ID NO: 247 |
| TPS18JL | 5 | TPS18JL-5R | TTGCATAGTGAAGTTTGTATCTCTCT | SEQ ID NO: 248 |
| TPS18JL | 6a | TPS18JL-6aF | TTCCATGAAGCACAATGGTTGA | SEQ ID NO: 249 |
| TPS18JL | 6a | TPS18JL-6aR | GCATTCCAACAAAAGAGGTCTCA | SEQ ID NO: 250 |
| TPS18JL | 6b | TPS18JL-6bF | GGTTACCCAATGTTGATTGAGACC | SEQ ID NO: 251 |
| TPS18JL | b | TPS18JL-6bR | GGTTGTGTAGAGAGCCATTCAAATA | SEQ ID NO: 252 |
| TPS18JL | 7 | TPS18JL-7F | TGGTGTATCGGAACAAGAGGC | SEQ ID NO: 253 |
| TPS18JL | 7 | TPS18JL-7R | CAACGCAGCAACACTGTCC | SEQ ID NO: 254 |
| TPS18VF | 1 | TPS18VF-1F | ACGCATCTTTTCGTCCCTTT | SEQ ID NO: 255 |
| TPS18VF | 1 | TPS18VF-1R | TGAGATCACCGTTACTCCTGATA | SEQ ID NO: 256 |
| TPS18VF | 2 | TPS18VF-2F | AGCAGACCCATTTGATGAAGG | SEQ ID NO: 257 |
| TPS18VF | 2 | TPS18VF-2R | CAGCAGGAACGAAGAGACCG | SEQ ID NO: 258 |
| TPS18VF | 3a | TPS18VF-3aF | TCGACACAAGGCTAAGAGAGG | SEQ ID NO: 259 |
| TPS18VF | 3a | TPS18VF-3aR | GTCCTTGGCTGTGAACTTGG | SEQ ID NO: 260 |
| TPS18VF | 3b | TPS18VF-3bF | CAAGTTCACAGCCAAGGACC | SEQ ID NO: 261 |
| TPS18VF | 3b | TPS18VF-3bR | TTATCAATTTCCATTCTATGCAGGG | SEQ ID NO: 262 |
| TPS18VF | 4 | TPS18VF-4F | GGTGGCGAGACATTGGTTTAGC | SEQ ID NO: 263 |
| TPS18VF | 4 | TPS18VF-4R | ATGGATTTTGTAAGCGCAACCC | SEQ ID NO: 264 |
| TPS18VF | 5 | TPS18VF-5F | TGCTATACAAAAACTTCCAGACTCC | SEQ ID NO: 265 |
| TPS18VF | 5 | TPS18VF-5R | TGTAAAGGGCTCCATCCACG | SEQ ID NO: 266 |
| TPS18VF | 6a | TPS18VF-6aF | GGGCAAGTTTGTGCGAAGC | SEQ ID NO: 267 |
| TPS18VF | 6a | TPS18VF-6aR | TGGCACTACCAAAGTCATCCC | SEQ ID NO: 268 |
| TPS18VF | 6b | TPS18VF-6bF | ATGGTGTGGTCAGCTCAGG | SEQ ID NO: 269 |
| TPS18VF | 6b | TPS18VF-6bR | TGGCACTACCAAAGTCATCCC | SEQ ID NO: 270 |
| TPS18VF | 7a | TPS18VF-7aF | AGAATCAAGAAGGACATGACGG | SEQ ID NO: 271 |
| TPS18VF | 7a | TPS18VF-7aR | TTTGTTGAGGCACTTCCATGC | SEQ ID NO: 272 |
| TPS18VF | 7b | TPS18VF-7bF | AAGTGCCTCAACAAAGAATGC | SEQ ID NO: 273 |
| TPS18VF | 7b | TPS18VF-7bR | GTTCTTCCAAGTGGGGTAGG | SEQ ID NO: 274 |
| TPS19BL | 1 | TPS19BL-1F | ATGGCGTTGTCAATAATGTCTTCTTACG | SEQ ID NO: 275 |
| TPS19BL | 1 | TPS19BL-1R | GAGAACTCGAAAGTGATGAGGAGG | SEQ ID NO: 276 |
| TPS19BL | 2a | TPS19BL-2aF | AGCAGACCCATTTGATGAAGG | SEQ ID NO: 277 |
| TPS19BL | 2a | TPS19BL-2aR | AGCAGGAACGAAGTGACCG | SEQ ID NO: 278 |
| TPS19BL | 2b | TPS19BL-2bF | GATAAATACAGGGACGTTTTAAGAAAAGC | SEQ ID NO: 279 |
| TPS19BL | 2b | TPS19BL-2bR | CCTCGAAGATATAGTCAATTCCTAGC | SEQ ID NO: 280 |
| TPS19BL | 3 | TPS19BL-3F | ATATGAAGCCTCCCATCTATGC | SEQ ID NO: 281 |
| TPS19BL | 3 | TPS19BL-3R | CCATTCTCACTGGGATAGACACC | SEQ ID NO: 282 |
| TPS19BL | 4 | TPS19BL-4F | GGTGGCGAGACATTGGTTTAGC | SEQ ID NO: 283 |
| TPS19BL | 4 | TPS19BL-4R | ATGGATTTTGTAAGCGCAACCC | SEQ ID NO: 284 |
| TPS19BL | 5a | TPS19BL-5aF | AGAAAAACTTCCAGACTCCATGA | SEQ ID NO: 285 |
| TPS19BL | 5a | TPS19BL-5aR | GCTCCATCCACGCTTTTGAT | SEQ ID NO: 286 |
| TPS19BL | 5b | TPS19BL5bF | TCAATGAGTCTAGCCATACGATCT | SEQ ID NO: 287 |
| TPS19BL | 5b | TPS19BL-5bR | TGTAAAGGGCTCCATCCACG | SEQ ID NO: 288 |
| TPS19BL | 6 | TPS19BL-6F | GGGCAAGTTTGTGCGAAGC | SEQ ID NO: 289 |
| TPS19BL | 6 | TPS19BL-6R | TGGCACTACCAAAGTCATCCC | SEQ ID NO: 290 |
| TPS19BL | 7a | TPS19BL-7aF | GGACATGACGGATCTTATGTGG | SEQ ID NO: 291 |
| TPS19BL | 7a | TPS19BL-7aR | TTGTTGAGGCACTTCCATGC | SEQ ID NO: 292 |
| TPS19BL | 7b | TPS19BL-7bF | ATCCAGCGTTTCCACCACC | SEQ ID NO: 293 |
| TPS19BL | 7b | TPS19BL-7bR | GTTCTTCCAAGTGGGGTAGGC | SEQ ID NO: 294 |
| TPS1JL | 1 | TPS1JL-1F | ACCAATTTGCTTCATCATCATCCC | SEQ ID NO: 295 |
| TPS1JL | 1 | TPS1JL-1R | AAATGGGAGGTCCATAGTTGGC | SEQ ID NO: 296 |
| TPS1JL | 2 | TPS1JL-2F | TGAAAAGGATGCTAATTGGAGTGG | SEQ ID NO: 297 |
| TPS1JL | 2 | TPS1JL-2R | CGTAGAAGCCTAAATTGGAGAGC | SEQ ID NO: 298 |
| TPS1JL | 3 | TPS1JL-3F | ATCACAAGACAGGAGAGTTCAAGGC | SEQ ID NO: 299 |
| TPS1JL | 3 | TPS1JL-3R | ATTCTCCATTGAAGTGGCATCTCC | SEQ ID NO: 300 |
| TPS1JL | 4a | TPS1JL-4aF | ACTTGGAGAGAAATTGCCTTTCG | SEQ ID NO: 301 |
| TPS1JL | 4a | TPS1JL-4aR | TCCAATGTTCCATAAATGTCATGC | SEQ ID NO: 302 |
| TPS1JL | 4b | TPS1JL-4bF | GCAAGTTGGAGTAAGATTTGAGC | SEQ ID NO: 303 |
| TPS1JL | 4b | TPS1JL-4bR | ATTAGTGAAAAGTTGTAGTTCCTCC | SEQ ID NO: 304 |
| TPS1JL | 5 | TPS1JL-5F | TAAGTTACCAGATTATATGAAGACAGC | SEQ ID NO: 305 |
| TPS1JL | 5 | TPS1JL-5R | TTTGTGAAATTGTATGTAAAGTAGAAAGC | SEQ ID NO: 306 |
| TPS1JL | 6 | TPS1JL-6F | AGAATGGATGGTTGTCTGTGGG | SEQ ID NO: 307 |
| TPS1JL | 6 | TPS1JL-6R | GGCGAACTATGTTAGGATGACC | SEQ ID NO: 308 |
| TPS1JL | 7 | TPS1JL-7F | CAATTCAATGTTATATGCACGATACTGG | SEQ ID NO: 309 |
| TPS1JL | 7 | TPS1JL-7R | CTGAGAAGCATGTCCATCGCC | SEQ ID NO: 310 |
| TPS20CT | 1 | TPS20CT-1F | ATTCAAGTCTTAGCTTCATCTCAATTA | SEQ ID NO: 311 |
| TPS20CT | 1 | TPS20CT-1R | CGATCACCCCAAATAGAAGGGT | SEQ ID NO: 312 |
| TPS20CT | 2 | TPS20CT-2F | TTTGAGAGTGAAATTGAGAAATTGTTGG | SEQ ID NO: 313 |
| TPS20CT | 2 | TPS20CT-2R | TAAATCCATGTTGTCTTAATAATCTAAACC | SEQ ID NO: 314 |
| TPS20CT | 3a | TPS20CT-3aF | GCCTAATAACCGATGTTCCAGG | SEQ ID NO: 315 |
| TPS20CT | 3a | TPS20CT-3aR | GAGATGTAAAACCTAGCATGAAGCC | SEQ ID NO: 316 |
| TPS20CT | 3b | TPS20CT-3bF | AGACCATAGAGAGGCTTCATGC | SEQ ID NO: 317 |
| TPS20CT | 3b | TPS20CT-3bR | CGTAATTTCACTAAGTTCCTTTTTGTGG | SEQ ID NO: 318 |
| TPS20CT | 4 | TPS20CT-4F | GGTGGAAGGAGCATGAGTTTGC | SEQ ID NO: 319 |
| TPS20CT | 4 | TPS20CT-4R | ACCTTTGAATTGCTTTGGTAAGAAGC | SEQ ID NO: 320 |
| TPS20CT | 6 | TPS20CT-6F | GAGTCTCTTATGTTTCTTCTGGTAACG | SEQ ID NO: 321 |
| TPS20CT | 6 | TPS20CT-6R | CATGAACCTAGAAAGGAGAGTAGAAGC | SEQ ID NO: 322 |
| TPS20CT | 7a | TPS20CT-7aF | TGAGCAAAAGAGAAATCACATACC | SEQ ID NO: 323 |
| TPS20CT | 7a | TPS20CT-7aR | TTTCTTTCCAGTGGGTGTCC | SEQ ID NO: 324 |
| TPS20CT | 7b | TPS20CT-7bF | CCAGCAGTTGTGCCCTTTCC | SEQ ID NO: 325 |
| TPS20CT | 7b | TPS20CT-7bR | CAATGCTTTCTTTGAGCACTTTTCC | SEQ ID NO: 326 |
| TPS20JL | 1 | TPS20JL-1F | TCAAGTCTTAGCTTCATCTCAATTATGTG | SEQ ID NO: 327 |
| TPS20JL | 1 | TPS20JL-1R | GATCACCCCAAATAGAAGGGT | SEQ ID NO: 328 |
| TPS20JL | 2 | TPS20JL-2F | TTCGAGAGTGAAATCGAGAAATTATTGG | SEQ ID NO: 329 |
| TPS20JL | 2 | TPS20JL-2R | ATCCACTTTGTCTTAATAGTCTAAACCG | SEQ ID NO: 330 |
| TPS20JL | 3a | TPS20JL-3aF | CTTGCTTTCACAACCACTCACC | SEQ ID NO: 331 |
| TPS20JL | 3a | TPS20JL-3aR | CCTCTCTATGGTCTTTCTTAGAGGC | SEQ ID NO: 332 |
| TPS20JL | 3b | TPS20JL-3bF | ATAACCGATGTTTCAGGTTTGC | SEQ ID NO: 333 |
| TPS20JL | 3b | TPS20JL-3bR | TAAGGTGAGTGGTTGTGAAAGC | SEQ ID NO: 334 |
| TPS20JL | 4 | TPS20JL-4F | GTGTATATTATGAACCCAAATACTCTCG | SEQ ID NO: 335 |
| TPS20JL | 4 | TPS20JL-4R | CCTTTGAATTGCTTTGGTAAGAAGC | SEQ ID NO: 336 |
| TPS20JL | 6 | TPS20JL-6F | GAACTATTGGAGGTTATTTTGAAGAAGC | SEQ ID NO: 337 |
| TPS20JL | 6 | TPS20JL-6R | GAGTGGAAGCTGAAACAATCTTAGGG | SEQ ID NO: 338 |
| TPS20JL | 7 | TPS20JL-7F | TGAGCAAGAGAGAAATCACATACC | SEQ ID NO: 339 |
| TPS20JL | 7 | TPS20JL-7R | AGAACACGAAGTAAGATAGGAAAAGG | SEQ ID NO: 340 |
| TPS23JL | 1 | TPS23JL-1F | CACACAAATCTTAGTATCATTATCTTCAAA | SEQ ID NO: 341 |
| TPS23JL | 1 | TPS23JL-1R | CAAATCTTGTTGTGAAATGTTGTAATGT | SEQ ID NO: 342 |
| TPS23JL | 2 | TPS23JL-2F | TGTCAACAACAAAAGGTTGAGG | SEQ ID NO: 343 |
| TPS23JL | 2 | TPS23JL-2R | TCAAAATGATAAGACAATCCCAAACG | SEQ ID NO: 344 |
| TPS23JL | 3a | TPS23JL-3aF | GAACACCATGAAGACGATGATCC | SEQ ID NO: 345 |
| TPS23JL | 3a | TPS23JL-3aR | TGCTGACTTCACTAAGCTCC | SEQ ID NO: 346 |
| TPS23JL | 3b | TPS23JL-3bF | TGCTTGGTAAGTGATACCCTTGG | SEQ ID NO: 347 |
| TPS23JL | 3b | TPS23JL-3bR | AGGGCCTCTCTAGGGCTCG | SEQ ID NO: 348 |
| TPS23JL | 4 | TPS23JL-4F | TGCAAGAGATAGGATTGTGGAATTG | SEQ ID NO: 349 |
| TPS23JL | 4 | TPS23JL-4R | ACTCAAGTTCTTCAAGTGTACCATA | SEQ ID NO: 350 |
| TPS23JL | 5 | TPS23JL-5F | TTGTTATGAAGAGTTTGAGCAACTG | SEQ ID NO: 351 |
| TPS23JL | 5 | TPS23JL-5R | ACTCTGTATGTTTCTTCTTTTTCTAGCAG | SEQ ID NO: 352 |
| TPS23JL | 6 | TPS23JL-6F | TTTGAATGAAGCTCGATGTTTGC | SEQ ID NO: 353 |
| TPS23JL | 6 | TPS23JL-6R | CCATTAGCCTACAAATAGTAACAGATGC | SEQ ID NO: 354 |
| TPS23JL | 7a | TPS23JL-7aF | GCGTTTGTGAAGAGGAAGCC | SEQ ID NO: 355 |
| TPS23JL | 7a | TPS23JL-7aR | ACCCTTGAAAAGTTAAGAGCACG | SEQ ID NO: 356 |
| TPS23JL | 7b | TPS23JL-7bF | AGAAATAAATGAAGAGTTTTTGAAGCC | SEQ ID NO: 357 |
| TPS23JL | 7b | TPS23JL-7bR | TGGATGAATAAGCAAAGCAGC | SEQ ID NO: 358 |
| TPS24JL | 10a | TPS24JL-10aF | GCTCAAGTCTATGTTGAAGGAAGC | SEQ ID NO: 359 |
| TPS24JL | 10a | TPS24JL-10aR | AACATCCTCAGAAAGCATAGGTCC | SEQ ID NO: 360 |
| TPS24JL | 10b | TPS24JL-10bF | TCAATGGTTGAAATACGAGACCG | SEQ ID NO: 361 |
| TPS24JL | 10b | TPS24JL-10bR | ATCGTTGAGAAGTCGTCCG | SEQ ID NO: 362 |
| TPS24JL | 11 | TPS24JL-11F | CGCGTGGTTTTGGCTCTGG | SEQ ID NO: 363 |
| TPS24JL | 11 | TPS24JL-11R | GGTGAATCCGTCGTCATTGGC | SEQ ID NO: 364 |
| TPS24JL | 1 | TPS24JL-1F | TGCATTCCAACATTAGGTGCTC | SEQ ID NO: 365 |
| TPS24JL | 1 | TPS24JL-1R | TGCTTTTCCTTGCACCATTTAGT | SEQ ID NO: 366 |
| TPS24JL | 2a | TPS24JL-2aF | TTATGACACTGCCTGGGTGG | SEQ ID NO: 367 |
| TPS24JL | 2a | TPS24JL-2aR | GAGGAAGACCCCATGAACCG | SEQ ID NO: 368 |
| TPS24JL | 2b | TPS24JL-2bF | AGAGAATCAGCACTCTGACGG | SEQ ID NO: 369 |
| TPS24JL | 2b | TPS24JL-2bR | CACCCCATCGCTTCATTGC | SEQ ID NO: 370 |
| TPS24JL | 4 | TPS24JL-4F | TCAGGAAGCTACTCAGAGGG | SEQ ID NO: 371 |
| TPS24JL | 4 | TPS24JL-4R | ACAGAGAACCATTTTTCCTTTGG | SEQ ID NO: 372 |
| TPS24JL | 5 | TPS24JL-5F | TATGCTCGTCTCTCAATGGTGG | SEQ ID NO: 373 |
| TPS24JL | 5 | TPS24JL-5R | AGAACACACTCCTCTCCTTGC | SEQ ID NO: 374 |
| TPS24JL | 6 | TPS24JL-6F | TCCGAGATCATCATACACCCA | SEQ ID NO: 375 |
| TPS24JL | 6 | TPS24JL-6R | TCTCCCCTAGTTGAAATGCTGT | SEQ ID NO: 376 |
| TPS24JL | 7 | TPS24JL-7F | GAAAACTTCATATTGTTCCTCAAATGTTCG | SEQ ID NO: 377 |
| TPS24JL | 7 | TPS24JL-7R | GAGTTCTTCACGGTGTATTGATTGG | SEQ ID NO: 378 |
| TPS24JL | 8a | TPS24JL-8aF | GTGGGTTGTAGAGAATAGGTTGG | SEQ ID NO: 379 |
| TPS24JL | 8a | TPS24JL-8aR | GCGGGCATCAGATAATTCAGG | SEQ ID NO: 380 |
| TPS24JL | 8b | TPS24JL-8bF | CCTGAATTATCTGATGCCCGC | SEQ ID NO: 381 |
| TPS24JL | 8b | TPS24JL-8bR | CTAGTTCCTCTTCTGAACCTCC | SEQ ID NO: 382 |
| TPS24JL | 9 | TPS24JL-9F | CAGTGTTGATTGTTTGTCGGAGC | SEQ ID NO: 383 |
| TPS24JL | 9 | TPS24JL-9R | TTGTCACACTACGTCCTTGC | SEQ ID NO: 384 |
| TPS2FN | 1a | TPS2FN-1aF | AAGATCAGCCAACTATGATCCTCCC | SEQ ID NO: 385 |
| TPS2FN | 1a | TPS2FN-1aR | ATGGAAGAGACTGAATGAAATCAAAAGACC | SEQ ID NO: 386 |
| TPS2FN | 1b | TPS2FN-1bF | TTAGAAGATCAGCCAACTATGATCC | SEQ ID NO: 387 |
| TPS2FN | 1b | TPS2FN-1bR | GAATGAAATCAAAAGACCAAATGGG | SEQ ID NO: 388 |
| TPS2FN | 2 | TPS2FN-2F | AAAGAAGAAGTGAAAAAGATGTTAGTTGG | SEQ ID NO: 389 |
| TPS2FN | 2 | TPS2FN-2R | AAAAGCCTAAATTCGAGAGCAGTGG | SEQ ID NO: 390 |
| TPS2FN | 3a | TPS2FN-3aF | GAGACGGGAAAGTTCAAAGCG | SEQ ID NO: 391 |
| TPS2FN | 3a | TPS2FN-3aR | TGAAGTGGCATCTCCAAGGC | SEQ ID NO: 392 |
| TPS2FN | 3b | TPS2FN-3bF | CGCAAATTCAAGCAAAGTGC | SEQ ID NO: 394 |
| TPS2FN | 3b | TPS2FN-3bR | GCTTCATTCTATGTGAAAAATGGCG | SEQ ID NO: 393 |
| TPS2FN | 4a | TPS2FN-4aF | AAATGGTTTATGCTAGAGATAGATTGG | SEQ ID NO: 395 |
| TPS2FN | 4a | TPS2FN-4aR | CTTGCAGATATTCTCCTAAAGTGGC | SEQ ID NO: 396 |
| TPS2FN | 4b | TPS2FN-4bF | AGAGGCTTTTCTATGGCAGG | SEQ ID NO: 397 |
| TPS2FN | 4b | TPS2FN-4bR | AAGCTCTAATTCTTCCAATGTTCC | SEQ ID NO: 398 |
| TPS2FN | 5a | TPS2FN-5aF | TGCCTTTCTTTACTTTATTTAACACCG | SEQ ID NO: 399 |
| TPS2FN | 5a | TPS2FN-5aR | GCTCTTCTAACACATCATACGCC | SEQ ID NO: 400 |
| TPS2FN | 5b | TPS2FN-5bF | ACACCGTAAATGAAATGGCG | SEQ ID NO: 401 |
| TPS2FN | 5b | TPS2FN-5bR | CGAGTTCTTGAGGTATTCAACGC | SEQ ID NO: 402 |
| TPS2FN | 6a | TPS2FN-6aF | TGGGCAGAGTTATGTAGATGC | SEQ ID NO: 403 |
| TPS2FN | 6a | TPS2FN-6aR | TCCTATTGAAAGCGAGGCG | SEQ ID NO: 404 |
| TPS2FN | 6b | TPS2FN-6bF | ACGCCTCGCTTTCAATAGG | SEQ ID NO: 405 |
| TPS2FN | 6b | TPS2FN-6bR | CTGCAAGTCGTAACATCAAGG | SEQ ID NO: 406 |
| TPS2FN | 6c | TPS2FN-6cF | TGGAAGAGGCAAAATGGTTTTATAGC | SEQ ID NO: 407 |
| TPS2FN | 6c | TPS2FN-6cR | GATCATCTGCAAGTCGTAACATCAAGG | SEQ ID NO: 408 |
| TPS2FN | 7a | TPS2FN-7aF | AAAGAGGTGACATTCTTAAATCGG | SEQ ID NO: 409 |
| TPS2FN | 7a | TPS2FN-7aR | AGTTATATTCATCTTCATCATTCATCTCC | SEQ ID NO: 410 |
| TPS2FN | 7b | TPS2FN-7bF | GGTGTTTCTGAAGATGAAGCTCG | SEQ ID NO: 411 |
| TPS2FN | 7b | TPS2FN-7bR | CTGAAATACGTTTCCTTGAATGGC | SEQ ID NO: 412 |
| TPS30JL | 2 | TPS30JL-2F | TCTCGAAGATCAGCAAACTATCAACC | SEQ ID NO: 413 |
| TPS30JL | 2 | TPS30JL-2R | ACATAATCAAATTGCCAAAGTGGG | SEQ ID NO: 414 |
| TPS30JL | 4a | TPS30JL-4aF | AGACTTGGAATCTCTTATCACTTTGAG | SEQ ID NO: 415 |
| TPS30JL | 4a | TPS30JL-4aR | GGCATACACATTATTTTTGTTGGTGTT | SEQ ID NO: 416 |
| TPS30JL | 4b | TPS30JL-4bF | GTACAACACCAACAAAAATAATGTGT | SEQ ID NO: 417 |
| TPS30JL | 4b | TPS30JL-4bR | TCGTAGGAGTCTAAATTCAAGAGAA | SEQ ID NO: 418 |
| TPS30JL | 5 | TPS30JL-5F | GAGGCAATTTTATGGTGTGTACC | SEQ ID NO: 419 |
| TPS30JL | 5 | TPS30JL-5R | TTGTTTTGTGTCTTGTCTCTTCC | SEQ ID NO: 420 |
| TPS30JL | 6 | TPS30JL-6F | TGGGAAAGCACTGATATGGG | SEQ ID NO: 421 |
| TPS30JL | 6 | TPS30JL-6R | AGCTCCAATTCATCTAGTGTACC | SEQ ID NO: 422 |
| TPS30JL | 7 | TPS30JL-7F | TGGGACATTAGTGCTATGGATGG | SEQ ID NO: 423 |
| TPS30JL | 7 | TPS30JL-7R | TCTGAAGGAATTTTATTATATGGAGGC | SEQ ID NO: 424 |
| TPS30JL | 8 | TPS30JL-8F | AGATTTGAAGAGTACATTGAGAATGC | SEQ ID NO: 425 |
| TPS30JL | 8 | TPS30JL-8R | CGATGAATGTCGTATTATGGTAGGG | SEQ ID NO: 426 |
| TPS30JL | 9 | TPS30JL-9F | AGAGGAAGCTCGTCAACGTAT | SEQ ID NO: 427 |
| TPS30JL | 9 | TPS30JL-9R | ATGTGCCATTCTACCAAGGTT | SEQ ID NO: 428 |
| TPS30-likeJL | 1 | TPS30-likeJL-1F | GACTTGGAATCTCTTACCACTTTGA | SEQ ID NO: 429 |
| TPS30-likeJL | 1 | TPS30-likeJL-1R | ACCATGTTGTCTTAGGAGTCTAAAT | SEQ ID NO: 430 |
| TPS30-likeJL | 2 | TPS30-likeJL-2F | GAATAGTTCTCGAAGATCAGCAAAC | SEQ ID NO: 431 |
| TPS30-likeJL | 2 | TPS30-likeJL-2R | CAAATTGCCAAAGTGGGGGT | SEQ ID NO: 432 |
| TPS30-likeJL | 3 | TPS30-likeJL-3F | GCAAAGACTTGGAATCTCTTACCA | SEQ ID NO: 433 |
| TPS30-likeJL | 3 | TPS30-likeJL-3R | GAGACACCGGATAACCATGTTG | SEQ ID NO: 434 |
| TPS30-likeJL | 4 | TPS30-likeJL-4F | GAGGCAATTTTATGGTGTCTTCC | SEQ ID NO: 435 |
| TPS30-likeJL | 4 | TPS30-likeJL-4R | TGTTGTGTGTCTTGTCTCTTCC | SEQ ID NO: 436 |
| TPS30-likeJL | 5 | TPS30-likeJL-5F | GTGGGAAAGCACTGGTATGG | SEQ ID NO: 437 |
| TPS30-likeJL | 5 | TPS30-likeJL-5R | AGCTCCAATTCATCTAGTGTACC | SEQ ID NO: 438 |
| TPS30-likeJL | 6 | TPS30-likeJL-6F | TTAGTGCTATGGATGGGCTCC | SEQ ID NO: 439 |
| TPS30-likeJL | 6 | TPS30-likeJL-6R | CGATTTCTGAAGGACTTTTATTATATGG | SEQ ID NO: 440 |
| TPS30-likeJL | 7 | TPS30-likeJL-7F | AGAGAAGCAAGATGGTATTATGATGG | SEQ ID NO: 441 |
| TPS30-likeJL | 7 | TPS30-likeJL-7R | CGATGAATGTCGTATTATGGTAGGG | SEQ ID NO: 442 |
| TPS30-likeJL | 8a | TPS30-likeJL-8aF | TGGCGTGTCTGAAGAAGAAGC | SEQ ID NO: 443 |
| TPS30-likeJL | 8a | TPS30-likeJL-8aR | AACATTGGAGAGTAGTCATCACC | SEQ ID NO: 444 |
| TPS30-likeJL | 8b | TPS30-likeJL-8bF | CATGATGGTGATGACTACTCTCC | SEQ ID NO: 445 |
| TPS30-likeJL | 8b | TPS30-likeJL-8bR | AGTACATGATCTTTTGTTTGGCG | SEQ ID NO: 446 |
| TPS32JL | 1 | TPS32JL-1F | TGCAAAGAAGAACGAGTGAAGG | SEQ ID NO: 447 |
| TPS32JL | 1 | TPS32JL-1R | TGTTTGTAGTAGTTTAGATCATGTTTTTCC | SEQ ID NO: 448 |
| TPS32JL | 2 | TPS32JL-2F | ATAACCGATGTTTCGGGTTTGC | SEQ ID NO: 449 |
| TPS32JL | 2 | TPS32JL-2R | CCTCTCTATGGTCTTTCTTAATGGC | SEQ ID NO: 450 |
| TPS32JL | 3 | TPS32JL-3F | GAAAGCTAACAACCAAAATCTCTGC | SEQ ID NO: 451 |
| TPS32JL | 3 | TPS32JL-3R | TTGCATGGCTTGGGTAAGAAGC | SEQ ID NO: 452 |
| TPS32JL | 5 | TPS32JL-5F | AGAAGAAGCTCGATGGTTGAACG | SEQ ID NO: 453 |
| TPS32JL | 5 | TPS32JL-5R | CATGAACCTAGCAAGTAGAGTGG | SEQ ID NO: 454 |
| TPS32JL | 6 | TPS32JL-6F | GCCAACTGTTATGCCTTTCCC | SEQ ID NO: 455 |
| TPS32JL | 6 | TPS32JL-6R | GGGATTGGATCTATAAGTAAAGCAGC | SEQ ID NO: 456 |
| TPS33JL | 1 | TPS33JL-1F | ATGCTACCCCATCCAATGTGC | SEQ ID NO: 457 |
| TPS33JL | 1 | TPS33JL-1R | AATATAATCGAAAGACCAAATGGAGGGC | SEQ ID NO: 458 |
| TPS33JL | 2 | TPS33JL-2F | ATTAGTTGAGATGGAAAACTCTTTAGC | SEQ ID NO: 459 |
| TPS33JL | 2 | TPS33JL-2R | ATAGCCATGTTGACGTAGAAGCC | SEQ ID NO: 460 |
| TPS33JL | 3 | TPS33JL-3F | AGCTCCCACTTCATCGGAGG | SEQ ID NO: 461 |
| TPS33JL | 3 | TPS33JL-3R | TTTGGCTAACTCAAGCAACATAGG | SEQ ID NO: 462 |
| TPS33JL | 4a | TPS33JL-4aF | AGACATACTAAACTTGGAGAGAAATTGA | SEQ ID NO: 463 |
| TPS33JL | 4a | TPS33JL-4aR | TATTCCATAAGAAACATTCCATCAATCG | SEQ ID NO: 464 |
| TPS33JL | 4b | TPS33JL-4bF | GGAGACATACTAAACTTGGAGAGA | SEQ ID NO: 465 |
| TPS33JL | 4b | TPS33JL-4bR | GCTTTGGTGAAAAGCTCTAATTCAT | SEQ ID NO: 466 |
| TPS33JL | 5 | TPS33JL-5F | AGTTACCAGAATACATGAAGATGCC | SEQ ID NO: 467 |
| TPS33JL | 5 | TPS33JL-5R | TGAATGTTGATGGAGATTTCTTGG | SEQ ID NO: 468 |
| TPS33JL | 6 | TPS33JL-6F | AAATGGTTGGATTTCAGTAGGAGC | SEQ ID NO: 469 |
| TPS33JL | 6 | TPS33JL-6R | GAAAATCTCTTTAGTATTTGTAATTGTGCC | SEQ ID NO: 470 |
| TPS33JL | 7 | TPS33JL-7F | AATTGAAAAGAGGTGATGCTCCG | SEQ ID NO: 471 |
| TPS33JL | 7 | TPS33JL-7R | TTTGGATTGATTATCTTGAGAACTATGACC | SEQ ID NO: 472 |
| TPS36JL | 1 | TPS36JL-1F | AAAGATCAACCAGCAGCAATCG | SEQ ID NO: 473 |
| TPS36JL | 1 | TPS36JL-1R | GTGGGTTTGTAGTTTCCTGATCG | SEQ ID NO: 474 |
| TPS36JL | 2 | TPS36JL-2F | AAGGAGAGTGAAAATCCTTTAGTTAAGC | SEQ ID NO: 475 |
| TPS36JL | 2 | TPS36JL-2R | GAGTTTGAAATGAAGAGCAGTGGC | SEQ ID NO: 476 |
| TPS36JL | 3 | TPS36JL-3F | AATGCCTTCAAAAACGAGCAAAAGG | SEQ ID NO: 477 |
| TPS36JL | 3 | TPS36JL-3R | GTCATCAAGTATTGTTTGAGATGTTTGG | SEQ ID NO: 478 |
| TPS36JL | 4 | TPS36JL-4F | TGGCATTGAAATATGAGGCGG | SEQ ID NO: 479 |
| TPS36JL | 4 | TPS36JL-4R | GCTGAAGCTCATCTAGTGTACC | SEQ ID NO: 480 |
| TPS36JL | 5 | TPS36JL-5F | ATAAATGAACTGGATCAGCTACCCG | SEQ ID NO: 481 |
| TPS36JL | 5 | TPS36JL-5R | GATGGTGTGAATCCCATTTTCTTTGAGG | SEQ ID NO: 482 |
| TPS36JL | 6 | TPS36JL-6F | TTGGGGGATCTGTGTAAATGC | SEQ ID NO: 483 |
| TPS36JL | 6 | TPS36JL-6R | CAGTTCCTGAGACACGTAAAATGG | SEQ ID NO: 484 |
| TPS36JL | 7 | TPS36JL-7F | TGCTACATGC GTGAAAAGGG | SEQ ID NO:1398 |
| TPS36JL | 7 | TPS36JL-7R | TGTGATACAT CTCCATTGCTCC | SEQ ID NO: 1399 |
| TPS37FN | 1 | TPS37FN-1F | GCAGTGCATGGCTTTTCACC | SEQ ID NO: 485 |
| TPS37FN | 1 | TPS37FN-1R | TCCAAATAGGGAGGGATGATGA | SEQ ID NO: 486 |
| TPS37FN | 2 | TPS37FN-2F | ACAATGTACTGTGGTCGATAACCC | SEQ ID NO: 487 |
| TPS37FN | 2 | TPS37FN-2R | AATGAAATCAAAAGACCAAATGGGAGG | SEQ ID NO: 488 |
| TPS37FN | 3 | TPS37FN-3F | GAGAAAGACGTGAAAAGGATACTGG | SEQ ID NO: 489 |
| TPS37FN | 3 | TPS37FN-3R | TCAAATCCATATTGGCGTAGAAGC | SEQ ID NO: 490 |
| TPS37FN | 4 | TPS37FN-4F | AGCTTCATTCTATGGGAAAAAGGG | SEQ ID NO: 491 |
| TPS37FN | 4 | TPS37FN-4R | TGAACCACCTAGCTTCCAACC | SEQ ID NO: 492 |
| TPS37FN | 5 | TPS37FN-5F | GCAATCTAAACTTGGAGAAAAGAAAATGG | SEQ ID NO: 493 |
| TPS37FN | 5 | TPS37FN-5R | TTTGTGAAAAGCTCTAATTCCTCC | SEQ ID NO: 494 |
| TPS37FN | 7 | TPS37FN-7F | CATGCTTATTTTGCTTTCACAAATCCC | SEQ ID NO: 495 |
| TPS37FN | 7 | TPS37FN-7R | TAGGTCATCTTCAAGTCGTAAAAGTATGG | SEQ ID NO: 496 |
| TPS37FN | 8a | TPS37FN-8aF | GAGATGAAAAGAGGAGATGTTCCG | SEQ ID NO: 497 |
| TPS37FN | 8a | TPS37FN-8aR | AAGCATGTCCATCACCATAAAGG | SEQ ID NO: 498 |
| TPS37FN | 8b | TPS37FN-8bF | AAACATGGAAAGAGATGAATAAAGAAATGG | SEQ ID NO: 499 |
| TPS37FN | 8b | TPS37FN-8bR | GAGAAGCATGTCCATCACCATAAAGG | SEQ ID NO: 500 |
| TPS37JL | 1 | TPS37JL-1F | ATTCAAAGAACAACCGGAAGC | SEQ ID NO: 501 |
| TPS37JL | 1 | TPS37JL-1R | AAAAATGAGCATCCCACAACG | SEQ ID NO: 502 |
| TPS37JL | 2 | TPS37JL-2F | AAAGCTATGGGAAAAGAATCAATGAGC | SEQ ID NO: 503 |
| TPS37JL | 2 | TPS37JL-2R | GGAGTTTGAAATGAAGAGCAGTGG | SEQ ID NO: 504 |
| TPS37JL | 3 | TPS37JL-3F | GAGGCTTCATTCTATTCATTTAGGGG | SEQ ID NO: 505 |
| TPS37JL | 3 | TPS37JL-3R | TCAACAGATTTAGTTTGACATTGCC | SEQ ID NO: 506 |
| TPS37JL | 4 | TPS37JL-4F | TCTAGGTTGACAGAAAGGCTACC | SEQ ID NO: 507 |
| TPS37JL | 4 | TPS37JL-4R | GTCCATGAGTGTTAGCAAGAGACC | SEQ ID NO: 508 |
| TPS37JL | 5 | TPS37JL-5F | TATAAATGAATTGGATCAGCTACCCG | SEQ ID NO: 509 |
| TPS37JL | 5 | TPS37JL-5R | TATAAAAAGCAACAAACAATATCTTCATGT | SEQ ID NO: 510 |
| TPS37JL | 6a | TPS37JL-6aF | GTTGGGGGATCTGTGTAAATGC | SEQ ID NO: 511 |
| TPS37JL | 6a | TPS37JL-6aR | AGTTGGATATTGAAGCAAGTGTTCC | SEQ ID NO: 512 |
| TPS37JL | 6b | TPS37JL-6bF | TGTGTAAATGCTATATGGAGGAGGC | SEQ ID NO: 513 |
| TPS37JL | 6b | TPS37JL-6bR | TCGAAAGACAGTTCCTGAGACACG | SEQ ID NO: 514 |
| TPS37JL | 7 | TPS37JL-7F | TGCTACATGCGTGAAAAGGG | SEQ ID NO: 515 |
| TPS37JL | 7 | TPS37JL-7R | AGTACCAAAGCCATCACCC | SEQ ID NO: 516 |
| TPS38FN | 1 | TPS38FN-1F | TTAATATCATCATCACTACCTTGCATT | SEQ ID NO: 517 |
| TPS38FN | 1 | TPS38FN-1R | GGACTAATAGATGTTTTTGGTGTGAA | SEQ ID NO: 518 |
| TPS38FN | 2 | TPS38FN-2F | CAATGTACTGTGGTCAATAATAGTAGCC | SEQ ID NO: 519 |
| TPS38FN | 2 | TPS38FN-2R | AATCGAAAGACCAAATCGGAGG | SEQ ID NO: 520 |
| TPS38FN | 3 | TPS38FN-3F | ATAAGGGAGAATCCTATACAAGGC | SEQ ID NO: 521 |
| TPS38FN | 3 | TPS38FN-3R | CCTAAATTCGAGAGCAATGGGG | SEQ ID NO: 522 |
| TPS38FN | 4 | TPS38FN-4F | AGCATATTGGAGGAAGCTAGGG | SEQ ID NO: 523 |
| TPS38FN | 4 | TPS38FN-4R | TCGATAAACCACTTGGCCTCC | SEQ ID NO: 524 |
| TPS38FN | 5 | TPS38FN-5F | GATCTAAAACATTTGTCTAGGTGGTGG | SEQ ID NO: 525 |
| TPS38FN | 5 | TPS38FN-5R | ATTCTCCTAAAGTAGCTGAAATCTGG | SEQ ID NO: 526 |
| TPS38FN | 6 | TPS38FN-6F | TCGTGTTGTTGAGAGATGGG | SEQ ID NO: 527 |
| TPS38FN | 6 | TPS38FN-6R | AAGTGTTTTTCTTTTAATACATCTAGTGCC | SEQ ID NO: 528 |
| TPS38FN | 7 | TPS38FN-7F | TGGTTGGATTTCAGTAGGAGC | SEQ ID NO: 529 |
| TPS38FN | 7 | TPS38FN-7R | ACGATCATGGCAGATTGACG | SEQ ID NO: 530 |
| TPS38FN | 8 | TPS38FN-8F | CATAACGTATCTAAAGAGGAAGCTCG | SEQ ID NO: 531 |
| TPS38FN | 8 | TPS38FN-8R | TGCAAAGTTTTTGGCATCATCAACC | SEQ ID NO: 532 |
| TPS38JL | 1 | TPS38JL-1F | AAAGATCAACCAGCAGCAATCG | SEQ ID NO: 533 |
| TPS38JL | 1 | TPS38JL-1R | GTGGGTTTGTAGTTTCCTGATCG | SEQ ID NO: 534 |
| TPS38JL | 2a | TPS38JL-2aF | AAGCTATGGGAAAAGAATCAATGAGC | SEQ ID NO: 535 |
| TPS38JL | 2a | TPS38JL-2aR | GAGTTTGAAATGAAGAGCAGTGG | SEQ ID NO: 536 |
| TPS38JL | 2b | TPS38JL-2bF | AGGCTGAAAATCCTTTAGTTAAGC | SEQ ID NO: 537 |
| TPS38JL | 2b | TPS38JL-2bR | GGACTGAATCCATATTGTCGAAGG | SEQ ID NO: 538 |
| TPS38JL | 3 | TPS38JL-3F | TGCCTTCAAAAACGAGAAAAAGG | SEQ ID NO: 539 |
| TPS38JL | 3 | TPS38JL-3R | AGTCTCTTGCTTCATCTAATATGGG | SEQ ID NO: 540 |
| TPS38JL | 4 | TPS38JL-4F | TGCAGTGGCATTGAAATATGAGG | SEQ ID NO: 541 |
| TPS38JL | 4 | TPS38JL-4R | GCTGAAGCTCATCTAGTGTACC | SEQ ID NO: 542 |
| TPS38JL | 5 | TPS38JL-5F | ATAAATGAACTGGATCAGCTACCCG | SEQ ID NO: 543 |
| TPS38JL | 5 | TPS38JL-5R | TATAAAAAGCAACAAACAATATCTTCATGT | SEQ ID NO: 544 |
| TPS38JL | 6 | TPS38JL-6F | TGCTATATGGAGGAGGCAAAATGG | SEQ ID NO: 545 |
| TPS38JL | 6 | TPS38JL-6R | TCGAAAAACAGTTCCTGAGACACG | SEQ ID NO: 546 |
| TPS38JL | 7 | TPS38JL-7F | TGCTACATGCGTGAAAAGGG | SEQ ID NO: 547 |
| TPS38JL | 7 | TPS38JL-7R | TGTGGTACATCTCCATTGCTCC | SEQ ID NO: 548 |
| TPS39JL | 1 | TPS39JL-1F | TGGCTTTTCACCAATTTGCTCC | SEQ ID NO: 549 |
| TPS39JL | 1 | TPS39JL-1R | AAATGGGAGGTCCATAGTTGGC | SEQ ID NO: 550 |
| TPS39JL | 2 | TPS39JL-2F | TTGAAGAAAGAAGTGACAAGATGGC | SEQ ID NO: 551 |
| TPS39JL | 2 | TPS39JL-2R | GGCGTAGAAGCCTAAATTCGC | SEQ ID NO: 552 |
| TPS39JL | 3 | TPS39JL-3F | ACATGGAGAAAATGGAGAATGAGG | SEQ ID NO: 553 |
| TPS39JL | 3 | TPS39JL-3R | CGCAACCTCGAAACAAGTCG | SEQ ID NO: 554 |
| TPS39JL | 4 | TPS39JL-4F | AGGGGATTGTAAACTTGGTGG | SEQ ID NO: 555 |
| TPS39JL | 4 | TPS39JL-4R | TTCTCTAAAATAGCTGAAATTCTCCTCG | SEQ ID NO: 556 |
| TPS39JL | 5 | TPS39JL-5F | TGAGTTACCAGATTACATGAAGATGCC | SEQ ID NO: 557 |
| TPS39JL | 5 | TPS39JL-5R | ACTAATACATCGAACCCCATCTCA | SEQ ID NO: 558 |
| TPS39JL | 6 | TPS39JL-6F | ACAAGAAGCAAAATGGTATTATAGTGG | SEQ ID NO: 559 |
| TPS39JL | 6 | TPS39JL-6R | TTTTGTTATAGGATTTGTGAAACAATAAGC | SEQ ID NO: 560 |
| TPS39JL | 7 | TPS39JL-7F | ATAATGCTACCGAAGACGAAGC | SEQ ID NO: 561 |
| TPS39JL | 7 | TPS39JL-7R | TCTGAGAACCATGTCCATCTCC | SEQ ID NO: 562 |
| TPS3JL | 1 | TPS3JL-1F | AATCACTTTTGTAGATTTTTCACACC | SEQ ID NO: 563 |
| TPS3JL | 1 | TPS3JL-1R | GTAATCGAAAGACCAAATCGGAGG | SEQ ID NO: 564 |
| TPS3JL | 2 | TPS3JL-2F | AGAAAGAAGTGACAAGAATGCTCC | SEQ ID NO: 565 |
| TPS3JL | 2 | TPS3JL-2R | AGCCATGTTGGCGTAGAAGC | SEQ ID NO: 566 |
| TPS3JL | 3a | TPS3JL-3aF | TGCTTTCAAGGATAAGAGAGGG | SEQ ID NO: 567 |
| TPS3JL | 3a | TPS3JL-3aR | TCTTCCTCATTCTCCATTTTCTCC | SEQ ID NO: 568 |
| TPS3JL | 3b | TPS3JL-3bF | AATACATGGAGAAAATGGAGAATGAGG | SEQ ID NO: 569 |
| TPS3JL | 3b | TPS3JL-3bR | CGCAAACTCGAACAAAGTCG | SEQ ID NO: 570 |
| TPS3JL | 4 | TPS3JL-4F | TTTGCTAGAGATAGATTGATGGAAGC | SEQ ID NO: 571 |
| TPS3JL | 4 | TPS3JL-4R | AAAAGCTCTAATTCCTCCAAAGTTCC | SEQ ID NO: 572 |
| TPS3JL | 5 | TPS3JL-5F | ATCAATGAGTTACCAGATTACATGAAG | SEQ ID NO: 573 |
| TPS3JL | 5 | TPS3JL-5R | ACTAATACATCGAACCCCATCTCAT | SEQ ID NO: 574 |
| TPS3JL | 6 | TPS3JL-6F | ATACACTGAGTTGGGTTGGC | SEQ ID NO: 575 |
| TPS3JL | 6 | TPS3JL-6R | TGTTCCTAAATCATCTGCAAGCC | SEQ ID NO: 576 |
| TPS3JL | 7 | TPS3JL-7F | GAATTGAATAGAGGCGACGTTCC | SEQ ID NO: 577 |
| TPS3JL | 7 | TPS3JL-7R | ATAGTGCTGTTCTAGCCATATTTTTGC | SEQ ID NO: 578 |
| TPS40JL | 1a | TPS40JL-1aF | CAATGTACTGTGGTCAATAATAGTAGCC | SEQ ID NO: 579 |
| TPS40JL | 1a | TPS40JL-1aR | AATCGAAAGACCAAATCGGAGG | SEQ ID NO: 580 |
| TPS40JL | 1b | TPS40JL-1bF | ACTGTGGTCAATAATAGTAGCCC | SEQ ID NO: 581 |
| TPS40JL | 1b | TPS40JL-1bR | TGAATGTAATCGAAAGACCAAATCGG | SEQ ID NO: 582 |
| TPS40JL | 2 | TPS40JL-2F | AATATAAGGGAGAATCCTATACAAGGC | SEQ ID NO: 583 |
| TPS40JL | 2 | TPS40JL-2R | ATAGCCATGTTGGCGTAGAAGC | SEQ ID NO: 584 |
| TPS40JL | 3a | TPS40JL-3aF | TGAGAAAAATGGTGAAAGCATATTGG | SEQ ID NO: 585 |
| TPS40JL | 3a | TPS40JL-3aR | TCCGTTCTTGCAGTCCTCC | SEQ ID NO: 586 |
| TPS40JL | 3b | TPS40JL-3bF | GAGGACTGCAAGAACGGAGG | SEQ ID NO: 587 |
| TPS40JL | 3b | TPS40JL-3bR | ACAAATGTTTTAGATCGTCTTGATGC | SEQ ID NO: 588 |
| TPS40JL | 4 | TPS40JL-4F | TTTGTGAGAGATAGGTTGATGGGG | SEQ ID NO: 589 |
| TPS40JL | 4 | TPS40JL-4R | AAAGCTCTAATTCTTCTAATGTTCCG | SEQ ID NO: 590 |
| TPS40JL | 6 | TPS40JL-6F | ATGGTTGGATTTCAGTAGGAGC | SEQ ID NO: 591 |
| TPS40JL | 6 | TPS40JL-6R | GTACGATCATGGCAGATTGACG | SEQ ID NO: 592 |
| TPS40JL | 7 | TPS40JL-7F | ATGCAAGACCATAATGTATCTAAAGAGG | SEQ ID NO: 593 |
| TPS40JL | 7 | TPS40JL-7R | TGCAAAGTTTTTGGCATCATCAACC | SEQ ID NO: 594 |
| TPS41JL | 1 | TPS41JL-1F | TCAATGTACTGTAGTCGATAGTTCTAATCC | SEQ ID NO: 595 |
| TPS41JL | 1 | TPS41JL-1R | GACCAAATGGATGGTTCATAGTTGC | SEQ ID NO: 596 |
| TPS41JL | 2a | TPS41JL-2aF | TAGAAGTCGGGTGAAAGAGATCG | SEQ ID NO: 597 |
| TPS41JL | 2a | TPS41JL-2aR | AGAAGTCTAAATTCAAGAGCAATGG | SEQ ID NO: 598 |
| TPS41JL | 2b | TPS41JL-2bF | ATAGAAGTCGGGTGAAAGAGATCG | SEQ ID NO: 599 |
| TPS41JL | 2b | TPS41JL-2bR | AAGCGATAAGATACTCCAAGTCTTTGC | SEQ ID NO: 600 |
| TPS41JL | 3 | TPS41JL-3F | ACGAGACAGGAAAATTCAAGGC | SEQ ID NO: 601 |
| TPS41JL | 3 | TPS41JL-3R | TCCTCCAATGAAGTGGGAGC | SEQ ID NO: 602 |
| TPS41JL | 4 | TPS41JL-4F | GTGGAGGCATACTAAACTTGGG | SEQ ID NO: 603 |
| TPS41JL | 4 | TPS41JL-4R | AAAAGCTCTAATTCATCCAATGTTCC | SEQ ID NO: 604 |
| TPS41JL | 5 | TPS41JL-5F | ACCAGAATACATGAAGATGCCT | SEQ ID NO: 605 |
| TPS41JL | 5 | TPS41JL-5R | TGTTGATGGAGATGTCTTTGTCTCT | SEQ ID NO: 606 |
| TPS41JL | 6 | TPS41JL-6F | GTGGATAGATATGTGTAGAGGTTTTCT | SEQ ID NO: 607 |
| TPS41JL | 6 | TPS41JL-6R | AAGAACTGGTGCTCCCACTG | SEQ ID NO: 608 |
| TPS41JL | 7 | TPS41JL-7F | TGTTCGGATGAAATGAAAAGAGGC | SEQ ID NO: 609 |
| TPS41JL | 7 | TPS41JL-7R | TGTGACGCTCTACCAAGATTTTTGC | SEQ ID NO: 610 |
| TPS42JL | 1 | TPS42JL-1F | CAAATGTTCTGTGGTCCATAACCC | SEQ ID NO: 611 |
| TPS42JL | 1 | TPS42JL-1R | GACCAAATGGGAGGTTCATAGTTTCC | SEQ ID NO: 612 |
| TPS42JL | 2 | TPS42JL-2F | GAGAAAGATGTGAAAATGATGCTACTTGG | SEQ ID NO: 613 |
| TPS42JL | 2 | TPS42JL-2R | TGAGGTACTACAAATCCATACTCCC | SEQ ID NO: 614 |
| TPS42JL | 3 | TPS42JL-3F | GATGATGAAACAGGAGAGTTCAAGG | SEQ ID NO: 615 |
| TPS42JL | 3 | TPS42JL-3R | GACATTTGGTTGTGAAAATTCTTGC | SEQ ID NO: 616 |
| TPS42JL | 4 | TPS42JL-4F | TGGATCATGCTTTGGAAATGCC | SEQ ID NO: 617 |
| TPS42JL | 4 | TPS42JL-4R | AGCTCTTCTTGATATGTTGATTGC | SEQ ID NO: 618 |
| TPS42JL | 5a | TPS42JL-5aF | TGGTGGAAGCATTCTAAACTTGG | SEQ ID NO: 619 |
| TPS42JL | 5a | TPS42JL-5aR | AGCATTAGCGAAGAGTTGTAGTTCC | SEQ ID NO: 620 |
| TPS42JL | 5b | TPS42JL-5bF | AGTGTTTCATGTGGCAAGTTGG | SEQ ID NO: 621 |
| TPS42JL | 5b | TPS42JL-5bR | AGCGAAGAGTTGTAGTTCCTCC | SEQ ID NO: 622 |
| TPS42JL | 6 | TPS42JL-6F | GGGATTTGAAAGTAATAGATGAGTTACCG | SEQ ID NO: 623 |
| TPS42JL | 6 | TPS42JL-6R | AGAAAGCCATCTTCATGTAATCCG | SEQ ID NO: 624 |
| TPS42JL | 7 | TPS42JL-7F | AGTGGATACCAACCAACATTGC | SEQ ID NO: 625 |
| TPS42JL | 7 | TPS42JL-7R | TGTTATGAGATTTGTAAAACAGAAATAAGC | SEQ ID NO: 626 |
| TPS42JL | 8a | TPS42JL-8aF | GATGAAATGAAAAGAGGCGATGTTCC | SEQ ID NO: 627 |
| TPS42JL | 8a | TPS42JL-8aR | TCAAATGCTTGATGTGCTCACG | SEQ ID NO: 628 |
| TPS42JL | 8b | TPS42JL-8bF | TGGAAGGAGATGAATAATGAAAATGG | SEQ ID NO: 629 |
| TPS42JL | 8b | TPS42JL-8bR | GATCTTTTGATAGAGTATTTTGAGAAGC | SEQ ID NO: 630 |
| TPS43JL | 1 | TPS43JL-1F | TCACTTAGAACCACAAAAGACCC | SEQ ID NO: 631 |
| TPS43JL | 1 | TPS43JL-1R | GCCAACAAATAAGCCATGTTGC | SEQ ID NO: 632 |
| TPS43JL | 2a | TPS43JL-2aF | ACAGATTTAGAGGCAGAGATGGG | SEQ ID NO: 633 |
| TPS43JL | 2a | TPS43JL-2aR | GTGGTGAAACTCTTGGCTTCC | SEQ ID NO: 634 |
| TPS43JL | 2b | TPS43JL-2bF | AGCTTCACACCTTGGAATGG | SEQ ID NO: 635 |
| TPS43JL | 2b | TPS43JL-2bR | ATCCAACTTAGCCAACTCAAGC | SEQ ID NO: 636 |
| TPS43JL | 3 | TPS43JL-3F | TGCAAGAGATCGTGTGGTGG | SEQ ID NO: 637 |
| TPS43JL | 3 | TPS43JL-3R | ACTGCATTTGTGAAAAGTTCAAGC | SEQ ID NO: 638 |
| TPS43JL | 4 | TPS43JL-4F | TGGGACATAAGGGCAATAAGGG | SEQ ID NO: 639 |
| TPS43JL | 4 | TPS43JL-4R | CGATCACTTCATTACCAAAATTAAGCA | SEQ ID NO: 640 |
| TPS43JL | 5 | TPS43JL-5F | TCAGTTGGTGGTCATGCAGC | SEQ ID NO: 641 |
| TPS43JL | 5 | TPS43JL-5R | TGAAGTTCCTAAATCATCACTAAGCC | SEQ ID NO: 642 |
| TPS43JL | 6 | TPS43JL-6F | TCAGTGGAGTGCTACATGGC | SEQ ID NO: 643 |
| TPS43JL | 6 | TPS43JL-6R | TCACCATTATTTTTGGCAGGC | SEQ ID NO: 644 |
| TPS44JL | 1a | TPS44JL-1aF | ACAAAGAGAGTTATGTGAAGATTATTGAGC | SEQ ID NO: 645 |
| TPS44JL | 1a | TPS44JL-1aR | TCAAGTGTCTCTAAAGGGTTTTCC | SEQ ID NO: 646 |
| TPS44JL | 1b | TPS44JL-1bF | ACTTCATGGTCTTCATCCTTTGG | SEQ ID NO: 647 |
| TPS44JL | 1b | TPS44JL-1bR | TTCCCTAAGCAACCGAAAGC | SEQ ID NO: 648 |
| TPS44JL | 2 | TPS44JL-2F | GCCCTAATGCACCCTATTCG | SEQ ID NO: 649 |
| TPS44JL | 2 | TPS44JL-2R | TAATTCTTTTTGATGTAGTTGTTGAAGC | SEQ ID NO: 650 |
| TPS44JL | 3 | TPS44JL-3F | TGATGACCAAGTTGATTTCTTTGC | SEQ ID NO: 651 |
| TPS44JL | 3 | TPS44JL-3R | TTTCTAACTGCTTCAGTAAAAGGC | SEQ ID NO: 652 |
| TPS44JL | 4 | TPS44JL-4F | ACTAGAGTACATGAAAGTATGTTACAAGA | SEQ ID NO: 653 |
| TPS44JL | 4 | TPS44JL-4R | ACATAGCTCGCACAGTATGGA | SEQ ID NO: 654 |
| TPS44JL | 5 | TPS44JL-5F | AGGAAGCCCAATGGTTACACA | SEQ ID NO: 655 |
| TPS44JL | 5 | TPS44JL-5R | AGTTCGTATAATCTTAGGTTGGGGT | SEQ ID NO: 656 |
| TPS44JL | 6 | TPS44JL-6F | GTAGTGGCTTCCGCTGTGG | SEQ ID NO: 657 |
| TPS44JL | 6 | TPS44JL-6R | TCGCCTTCTCTATACATCTCATGG | SEQ ID NO: 658 |
| TPS45JL | 1 | TPS45JL-1F | TGGTCTTCATCCTTTGGAAAACCC | SEQ ID NO: 659 |
| TPS45JL | 1 | TPS45JL-1R | TTCCCTAAGCAACCGAAAGCG | SEQ ID NO: 660 |
| TPS45JL | 2 | TPS45JL-2F | GTGAAACATGCCCTAATGCACC | SEQ ID NO: 661 |
| TPS45JL | 2 | TPS45JL-2R | ATCTAGTTTGGCAGTTAAAAGAAGC | SEQ ID NO: 662 |
| TPS45JL | 3 | TPS45JL-3F | ACAGAATAGTGGAGTGTTACATTTGG | SEQ ID NO: 663 |
| TPS45JL | 3 | TPS45JL-3R | ATAATAGTAAGCAAAGAAATCAACTTGG | SEQ ID NO: 664 |
| TPS45JL | 5 | TPS45JL-5F | TTCAAAACTCCCAAAAAGCGAAA | SEQ ID NO: 665 |
| TPS45JL | 5 | TPS45JL-5R | TGTCACGTCAGCATACACTCC | SEQ ID NO: 666 |
| TPS45JL | 6a | TPS45JL-6aF | TCAAAAGATGTAGTGGCTTCTGC | SEQ ID NO: 667 |
| TPS45JL | 6a | TPS45JL-6aR | ATTAAGAGTGGTCTAGGAATAGCG | SEQ ID NO: 668 |
| TPS45JL | 6b | TPS45JL-6bF | CAATATGGTGTAACAGATGAAGAAGC | SEQ ID NO: 669 |
| TPS45JL | 6b | TPS45JL-6bR | TGAGAGTATCAATCAAATTCTTGAGC | SEQ ID NO: 670 |
| TPS46JL | 1 | TPS46JL-1F | CATCGAGACAAACTGCGAATACT | SEQ ID NO: 671 |
| TPS46JL | 1 | TPS46JL-1R | ATATGTGATCTCCATTTTCTTCCATTG | SEQ ID NO: 672 |
| TPS46JL | 2 | TPS46JL-2F | CATGGATGGCCCGATTGGA | SEQ ID NO: 673 |
| TPS46JL | 2 | TPS46JL-2R | TCGAAAATGATTCTTTCCAAGCCAT | SEQ ID NO: 674 |
| TPS46JL | 4 | TPS46JL-4F | GATTGGGGACTTAGTGAAATGGG | SEQ ID NO: 675 |
| TPS46JL | 4 | TPS46JL-4R | GTAAAGTTTTCTAACTCGGTGATTAAGG | SEQ ID NO: 676 |
| TPS46JL | 5 | TPS46JL-5F | GGTGGGATGGTGAAGGATTGA | SEQ ID NO: 677 |
| TPS46JL | 5 | TPS46JL-5R | TGATGTCACTTGTTTCTTGTTGAT | SEQ ID NO: 678 |
| TPS46JL | 6 | TPS46JL-6F | TCACACCTTGCTTCTTCCAGC | SEQ ID NO: 679 |
| TPS46JL | 6 | TPS46JL-6R | TCATTCAACAAACGACAAATAATCATAACC | SEQ ID NO: 680 |
| TPS46JL | 7 | TPS46JL-7F | ACTTGAAGAACAATCCCGAGG | SEQ ID NO: 681 |
| TPS46JL | 7 | TPS46JL-7R | AACCCTAACATCATCATCGTCG | SEQ ID NO: 682 |
| TPS47JL | 10a | TPS47JL-10aF | CAGACACTGAAATGCTTGACG | SEQ ID NO: 683 |
| TPS47JL | 10a | TPS47JL-10aR | TAGCGGTTAGACATTTAGAGGG | SEQ ID NO: 684 |
| TPS47JL | 10b | TPS47JL-10bF | CAACCCTCTAAATGTCTAACCGC | SEQ ID NO: 685 |
| TPS47JL | 10b | TPS47JL-10bR | AAATTGAGTTTTGAAGGCATAGTAGG | SEQ ID NO: 686 |
| TPS47JL | 1a | TPS47JL-1aF | ATCTTTGCCCCAAACTCAGG | SEQ ID NO: 687 |
| TPS47JL | 1a | TPS47JL-1aR | GGTTAGGATGTGGTATCATGGC | SEQ ID NO: 688 |
| TPS47JL | 1b | TPS47JL-1bF | TACCACATCCTAACCAACCTTCG | SEQ ID NO: 689 |
| TPS47JL | 1b | TPS47JL-1bR | CAACAACACAAGCCAGAGTGG | SEQ ID NO: 690 |
| TPS47JL | 2 | TPS47JL-2F | TATTCATTCATCTAATGCAAAAAGGC | SEQ ID NO: 691 |
| TPS47JL | 2 | TPS47JL-2R | AATATGTCCGAAACGAAAACGG | SEQ ID NO: 692 |
| TPS47JL | 3a | TPS47JL-3aF | TGTTATCATATCTTGAAGTGTTGCC | SEQ ID NO: 693 |
| TPS47JL | 3a | TPS47JL-3aR | CTGTTGCCGATGGAGATTGG | SEQ ID NO: 694 |
| TPS47JL | 3b | TPS47JL-3bF | CAATCTCCATCGGCAACAGC | SEQ ID NO: 695 |
| TPS47JL | 3b | TPS47JL-3bR | TGTTATTATTGGAAAACTTGTGAACTAGG | SEQ ID NO: 696 |
| TPS47JL | 4 | TPS47JL-4F | AGGGTTAGCTGAGCATTTCGC | SEQ ID NO: 697 |
| TPS47JL | 4 | TPS47JL-4R | CTAGGAAAAACTTTGTAGCCATGC | SEQ ID NO: 698 |
| TPS47JL | 5a | TPS47JL-5aF | ACTATGAATGCTTTTCGGTTACG | SEQ ID NO: 699 |
| TPS47JL | 5a | TPS47JL-5aR | AAAATAGACTTTTGAAGTAGTTTTCTCG | SEQ ID NO: 700 |
| TPS47JL | 5b | TPS47JL-5bF | TTGCTTTTCATGGTGAATTTGAGC | SEQ ID NO: 701 |
| TPS47JL | 5b | TPS47JL-5bR | TTTGTTAAAAGGATTTGTATGTGGAGC | SEQ ID NO: 702 |
| TPS47JL | 6 | TPS47JL-6F | TGGCTCGACTAGATCACTTGG | SEQ ID NO: 703 |
| TPS47JL | 6 | TPS47JL-6R | GTGAAACCTCGACAACCTTTGG | SEQ ID NO: 704 |
| TPS47JL | 7 | TPS47JL-7F | GGGGACTTAATGAAATGGGATTTGG | SEQ ID NO: 705 |
| TPS47JL | 7 | TPS47JL-7R | TCATAAGGCAAAGAACAACAAGC | SEQ ID NO: 706 |
| TPS47JL | 9 | TPS47JL-9F | CCATAGCAACTCACACCTTGC | SEQ ID NO: 707 |
| TPS47JL | 9 | TPS47JL-9R | ACACTCTCACATTGAATTGGTCG | SEQ ID NO: 708 |
| TPS48JL | 1 | TPS48JL-1F | CTTGCTTTTCATGGTGAATTTGAGC | SEQ ID NO: 709 |
| TPS48JL | 1 | TPS48JL-1R | CAGTTTCTTAAAGGGATTTGTATGTTGAGC | SEQ ID NO: 710 |
| TPS48JL | 2 | TPS48JL-2F | GATGGCTCGACTAGATCACC | SEQ ID NO: 711 |
| TPS48JL | 2 | TPS48JL-2R | AGATGTCTTTCCCATCCATAAAGC | SEQ ID NO: 712 |
| TPS48JL | 4 | TPS48JL-4F | AGAATGGGGACTTAGTGAAATGGG | SEQ ID NO: 713 |
| TPS48JL | 4 | TPS48JL-4R | TGGAGAATCATAAGGCAAATAACAGC | SEQ ID NO: 714 |
| TPS48JL | 5 | TPS48JL-5F | TGGAATAATGAAGGGTTGAGTGGT | SEQ ID NO: 715 |
| TPS48JL | 5 | TPS48JL-5R | TCTTATGTAGCTGGTTATGTCTTCA | SEQ ID NO: 716 |
| TPS48JL | 6a | TPS48JL-6aF | TGAATCTGAGTGGAGTAAAAGTGG | SEQ ID NO: 717 |
| TPS48JL | 6a | TPS48JL-6aR | AGAAGAAATGAAGCTGGAAGAAGC | SEQ ID NO: 718 |
| TPS48JL | 6b | TPS48JL-6bF | GCAACTCATACCTTGCTTCTTCC | SEQ ID NO: 719 |
| TPS48JL | 6b | TPS48JL-6bR | GAACTTTGTAAGTCATTCAACAAACG | SEQ ID NO: 720 |
| TPS48JL | 7a | TPS48JL-7aF | GAGGGAAAGAGAAGAAGGCAAACC | SEQ ID NO: 721 |
| TPS48JL | 7a | TPS48JL-7aR | ACTTTTAAGCAAGATAAGTGTAGAAGCC | SEQ ID NO: 722 |
| TPS48JL | 7b | TPS48JL-7bF | AATGACAATGGTTTTACCAATCTTCC | SEQ ID NO: 723 |
| TPS48JL | 7b | TPS48JL-7bR | AATCGCTTTGTTAATGTCTTCAAGC | SEQ ID NO: 724 |
| TPS49JL | 1 | TPS49JL-1F | TCGGCCAATTTTCATCCTAGT | SEQ ID NO: 725 |
| TPS49JL | 1 | TPS49JL-1R | GGTATATTTGAGAAAGTGATCTCCCC | SEQ ID NO: 726 |
| TPS49JL | 2 | TPS49JL-2F | GGATGCTAACTGCTGCCCC | SEQ ID NO: 727 |
| TPS49JL | 2 | TPS49JL-2R | AAAGGGAGACCGTATGAAGGG | SEQ ID NO: 728 |
| TPS49JL | 3a | TPS49JL-3aF | GAAATCCCAGTTGACCATGAGC | SEQ ID NO: 729 |
| TPS49JL | 3a | TPS49JL-3aR | GATGACTGTGGTTAGGGTCG | SEQ ID NO: 730 |
| TPS49JL | 3b | TPS49JL-3bF | CACAACTCATTTGGTGGAGGC | SEQ ID NO: 731 |
| TPS49JL | 3b | TPS49JL-3bR | AGATGACTGTGGTTAGGGTCG | SEQ ID NO: 732 |
| TPS49JL | 4a | TPS49JL-4aF | GGAAAGACTTGGACTTTGCATCG | SEQ ID NO: 733 |
| TPS49JL | 4a | TPS49JL-4aR | CTAGCAGCACTGTACTTTGGC | SEQ ID NO: 734 |
| TPS49JL | 4b | TPS49JL-4bF | GGAAAGACTTGGACTTTGCATCG | SEQ ID NO: 735 |
| TPS49JL | 4b | TPS49JL-4bR | TTGCGTCTGTGAAGAGTTCC | SEQ ID NO: 736 |
| TPS49JL | 5 | TPS49JL-5F | TATACGATGAAATTGAGGAGGAGTTGGC | SEQ ID NO: 737 |
| TPS49JL | 5 | TPS49JL-5R | AGGCCATCCGATAAGTTCTGCC | SEQ ID NO: 738 |
| TPS49JL | 6a | TPS49JL-6aF | TACTACGTGGAAGCTCAATGG | SEQ ID NO: 739 |
| TPS49JL | 6a | TPS49JL-6aR | AAGCCAATGAAAGACCTCAGC | SEQ ID NO: 740 |
| TPS49JL | 6b | TPS49JL-6bF | ACTACATGCTCACTGCCACG | SEQ ID NO: 741 |
| TPS49JL | 6b | TPS49JL-6bR | TCTGCAAACTACTGCTGATGC | SEQ ID NO: 742 |
| TPS49JL | 7a | TPS49JL-7aF | GTTTGAGCAAGATAGAGGACACG | SEQ ID NO: 743 |
| TPS49JL | 7a | TPS49JL-7aR | GCATGAGGACAGACATGGGC | SEQ ID NO: 744 |
| TPS49JL | 7b | TPS49JL-7bF | TGAATGAGGAGTGCATGGAGC | SEQ ID NO: 745 |
| TPS49JL | 7b | TPS49JL-7bR | TCCGGCATGGGTGTAACCG | SEQ ID NO: 746 |
| TPS4FN | 1 | TPS4FN-1F | AGCCTCATCACAAAATGACAAAGT | SEQ ID NO: 747 |
| TPS4FN | 1 | TPS4FN-1R | GGTTGATAAGTTGTTGTTGGACGA | SEQ ID NO: 748 |
| TPS4FN | 2 | TPS4FN-2F | AAGGAAGTGGTAAGGAGAGAGG | SEQ ID NO: 749 |
| TPS4FN | 2 | TPS4FN-2R | GAAACCATAAATCCATGTTGGCG | SEQ ID NO: 750 |
| TPS4FN | 3a | TPS4FN-3aF | AGCAAGGGAATTTTAAGGAGTGC | SEQ ID NO: 751 |
| TPS4FN | 3a | TPS4FN-3aR | AGGTGAGTGGTGGTGAAAGC | SEQ ID NO: 752 |
| TPS4FN | 3b | TPS4FN-3bF | TTGCTTTCACCACCACTCACC | SEQ ID NO: 753 |
| TPS4FN | 3b | TPS4FN-3bR | GAAATGTAATGCCTGGCGTGG | SEQ ID NO: 754 |
| TPS4FN | 4a | TPS4FN-4aF | TGCAAGAGATAGGATTGTGGAGC | SEQ ID NO: 755 |
| TPS4FN | 4a | TPS4FN-4aR | TCTGCAACTGAGGCCAATGC | SEQ ID NO: 756 |
| TPS4FN | 4b | TPS4FN-4bF | TGAACCTGAATTGTCACTGGC | SEQ ID NO: 757 |
| TPS4FN | 4b | TPS4FN-4bR | GCTCAAGCTCTTCAAATGTACC | SEQ ID NO: 758 |
| TPS4FN | 5 | TPS4FN-5F | AATTGTGCGGATCAACTTCG | SEQ ID NO: 759 |
| TPS4FN | 5 | TPS4FN-5R | TGTAACTTTCCTCCTTTCCAAGC | SEQ ID NO: 760 |
| TPS4FN | 6 | TPS4FN-6F | AGCGATGAAAAGATTACTTGGAGC | SEQ ID NO: 761 |
| TPS4FN | 6 | TPS4FN-6R | CATCCATGAACCTACAAAGGATATTGC | SEQ ID NO: 762 |
| TPS4FN | 7a | TPS4FN-7aF | AGAGATCATTCACCGTCTACCG | SEQ ID NO: 763 |
| TPS4FN | 7a | TPS4FN-7aR | AAACTGGATAAGGCACATTAGAAGGC | SEQ ID NO: 764 |
| TPS4FN | 7b | TPS4FN-7bF | GGCCTTCTAATGTGCCTTATCC | SEQ ID NO: 765 |
| TPS4FN | 7b | TPS4FN-7bR | TCATGGGATTTGATCTATAAGTAACGC | SEQ ID NO: 766 |
| TPS4JL | 1a | TPS4JL-1aF | AGTTTTAGCCTCATCACAAAATGACA | SEQ ID NO: 767 |
| TPS4JL | 1a | TPS4JL-1aR | GTTGATAAGTTGTTGTTGGACGAA | SEQ ID NO: 768 |
| TPS4JL | 1b | TPS4JL-1bF | TAGCCTCATCACAAAATGACAAAG | SEQ ID NO: 769 |
| TPS4JL | 1b | TPS4JL-1bR | CCCCCAAATAGAAGGTTGATAAGT | SEQ ID NO: 770 |
| TPS4JL | 2a | TPS4JL-2aF | TAAAAAGCAGCGAGTTGACG | SEQ ID NO: 771 |
| TPS4JL | 2a | TPS4JL-2aR | AATGATACGACAATCCCAAACG | SEQ ID NO: 772 |
| TPS4JL | 2b | TPS4JL-2bF | AAGGAAGTGGTAAGGAGAGAGG | SEQ ID NO: 773 |
| TPS4JL | 2b | TPS4JL-2bR | GAAACCATAAATCCATGTTGGCG | SEQ ID NO: 774 |
| TPS4JL | 3a | TPS4JL-3aF | AGCAAGGGAATTTTAAGGAGTGC | SEQ ID NO: 775 |
| TPS4JL | 3a | TPS4JL-3aR | AGGTGAGTGGTGGTGAAAGC | SEQ ID NO: 776 |
| TPS4JL | 3b | TPS4JL-3bF | CTTGCTTTCACCACCACTCACC | SEQ ID NO: 777 |
| TPS4JL | 3b | TPS4JL-3bR | GTAATGCCTGGCGTGGAGC | SEQ ID NO: 778 |
| TPS4JL | 4a | TPS4JL-4aF | GCAAGAGATAGGATTGTGGAGC | SEQ ID NO: 779 |
| TPS4JL | 4a | TPS4JL-4aR | ATCTGCAACTGAGGCCAAGG | SEQ ID NO: 780 |
| TPS4JL | 4b | TPS4JL-4bF | TGAACCTGAATTGTCACTGGC | SEQ ID NO: 781 |
| TPS4JL | 4b | TPS4JL-4bR | GCTCAAGCTCTTCAAATGTACC | SEQ ID NO: 782 |
| TPS4JL | 5 | TPS4JL-5F | AATTGTGCGGATCAACTTCG | SEQ ID NO: 783 |
| TPS4JL | 5 | TPS4JL-5R | TGTAACTTTCCTCCTTTCCAAGC | SEQ ID NO: 784 |
| TPS4JL | 6 | TPS4JL-6F | CAGTGAAGCTCGATGGTTGC | SEQ ID NO: 785 |
| TPS4JL | 6 | TPS4JL-6R | TCCATGAACCTACAAAGGATATTGC | SEQ ID NO: 786 |
| TPS4JL | 7a | TPS4JL-7aF | CCGTTGAGAGTTACATGAGGC | SEQ ID NO: 787 |
| TPS4JL | 7a | TPS4JL-7aR | ACTGGATAAGGCACATTAGAAGG | SEQ ID NO: 788 |
| TPS4JL | 7b | TPS4JL-7bF | ACAAGAGGCATGTGATGAGC | SEQ ID NO: 789 |
| TPS4JL | 7b | TPS4JL-7bR | GGGATTTGATCTATAAGTAACGCAGC | SEQ ID NO: 790 |
| TPS4-likeJL | 1 | TPS4-likeJL-1F | TGTCGTCTCAAATCTTAGCAACC | SEQ ID NO: 791 |
| TPS4-likeJL | 1 | TPS4-likeJL-1R | ATGCAAAAATCGGTCTCCCC | SEQ ID NO: 792 |
| TPS4-likeJL | 2a | TPS4-likeJL-2aF | TTCTTATGTGATGATTGGAGTAATCG | SEQ ID NO: 793 |
| TPS4-likeJL | 2a | TPS4-likeJL-2aR | GCTTATTTTGTTGTAAATGTGTTGAAGC | SEQ ID NO: 794 |
| TPS4-likeJL | 2b | TPS4-likeJL-2bF | CGATTGAAGTTAATTGATGTGGTGC | SEQ ID NO: 795 |
| TPS4-likeJL | 2b | TPS4-likeJL-2bR | AAAGAAACCCTATATCCATGTTGTCG | SEQ ID NO: 796 |
| TPS4-likeJL | 3a | TPS4-likeJL-3aF | GAATGTTTGGCGAGTGACACC | SEQ ID NO: 797 |
| TPS4-likeJL | 3a | TPS4-likeJL-3aR | AAGGGCCTCTCTAGGGCTCG | SEQ ID NO: 798 |
| TPS4-likeJL | 3b | TPS4-likeJL-3bF | AAGAACACCCCAATGATGATCC | SEQ ID NO: 799 |
| TPS4-likeJL | 3b | TPS4-likeJL-3bR | ACTAAGCTCCTTTTTGTGCATGG | SEQ ID NO: 800 |
| TPS4-likeJL | 4 | TPS4-likeJL-4F | GGTGGAAGGAATTAGACAGTGC | SEQ ID NO: 801 |
| TPS4-likeJL | 4 | TPS4-likeJL-4R | TCAGCGATTGAGGAAAGTGC | SEQ ID NO: 802 |
| TPS4-likeJL | 5 | TPS4-likeJL-5F | GGGACAAAAATTGTATGGATAAACTCC | SEQ ID NO: 803 |
| TPS4-likeJL | 5 | TPS4-likeJL-5R | TCCTTTTCAAACTCTTGTTCAAATTCC | SEQ ID NO: 804 |
| TPS4-likeJL | 6a | TPS4-likeJL-6aF | AGCTCGATGGTTGAATGAAGG | SEQ ID NO: 805 |
| TPS4-likeJL | 6a | TPS4-likeJL-6aR | GGTCTTTGGAGAGCCACTCG | SEQ ID NO: 806 |
| TPS4-likeJL | 6b | TPS4-likeJL-6bF | TGATGGCTTGCTCTTTAGTTGG | SEQ ID NO: 807 |
| TPS4-likeJL | 6b | TPS4-likeJL-6bR | AGCCACGTCATCCATGTACC | SEQ ID NO: 808 |
| TPS4-likeJL | 7a | TPS4-likeJL-7aF | AGAATGAGCAAGAGAGAAATCATATACC | SEQ ID NO: 809 |
| TPS4-likeJL | 7a | TPS4-likeJL-7aR | CCATGCAATAACCACTCGCC | SEQ ID NO: 810 |
| TPS4-likeJL | 7b | TPS4-likeJL-7bF | TCTCAAACCAACTGAAGCAGC | SEQ ID NO: 811 |
| TPS4-likeJL | 7b | TPS4-likeJL-7bR | TTGGATCAATGAGCAAGACAGC | SEQ ID NO: 812 |
| TPS50JL | 1 | TPS50JL-1F | GGTCTTCATCCTTTGGAAAATCC | SEQ ID NO: 813 |
| TPS50JL | 1 | TPS50JL-1R | AAGCAACCGAAATCGAAGAGC | SEQ ID NO: 814 |
| TPS50JL | 2 | TPS50JL-2F | AGCTTCACAAATGAGAGTTCGC | SEQ ID NO: 815 |
| TPS50JL | 2 | TPS50JL-2R | TCGTGAGAAGGTAGTTGATGG | SEQ ID NO: 816 |
| TPS50JL | 3 | TPS50JL-3F | ACAGAATAGTGGAGTGTTACATTTGG | SEQ ID NO: 817 |
| TPS50JL | 3 | TPS50JL-3R | ATAATAGTAAGCAAAGAAATCAACTTGG | SEQ ID NO: 818 |
| TPS50JL | 4 | TPS50JL-4F | ACAACTTGCCAGAGTACATGAAAG | SEQ ID NO: 819 |
| TPS50JL | 4 | TPS50JL-4R | CGCGCAGTATGAATTTTCCTTTG | SEQ ID NO: 820 |
| TPS50JL | 5 | TPS50JL-5F | GGATCTGAAGAGCTAATATCAATGGC | SEQ ID NO: 821 |
| TPS50JL | 5 | TPS50JL-5R | AGTTCGTATAATCTTAGGTTGGGG | SEQ ID NO: 822 |
| TPS50JL | 6a | TPS50JL-6aF | TCAAAAGATGTAGTGGCTTCTGC | SEQ ID NO: 823 |
| TPS50JL | 6a | TPS50JL-6aR | ATTAAGAGTGGTCTAGGAATAGCG | SEQ ID NO: 824 |
| TPS50JL | 6b | TPS50JL-6bF | CAATATGGTGTAACAGATGAAGAAGC | SEQ ID NO: 825 |
| TPS50JL | 6b | TPS50JL-6bR | TGAGAGTATCAATCAAATTCTTGAGC | SEQ ID NO: 826 |
| TPS51JL | 1 | TPS51JL-1F | AGCCAACTTTGAACCATCCA | SEQ ID NO: 827 |
| TPS51JL | 1 | TPS51JL-1R | AAAGAGACTGAATGAAATCAAAAGACCA | SEQ ID NO: 828 |
| TPS51JL | 2 | TPS51JL-2F | GAGGAAGATGTGAAAAGGATGC | SEQ ID NO: 829 |
| TPS51JL | 2 | TPS51JL-2R | GCCTAAATTCAAGAGCAGTGGC | SEQ ID NO: 830 |
| TPS51JL | 3a | TPS51JL-3aF | CAGGAAAATTCAAAACAAACATAAGTGG | SEQ ID NO: 831 |
| TPS51JL | 3a | TPS51JL-3aR | AGCTTCCTCTAAAATGCTTTCGC | SEQ ID NO: 832 |
| TPS51JL | 3b | TPS51JL-3bF | AGGCGAAAGCATTTTAGAGGAAGC | SEQ ID NO: 833 |
| TPS51JL | 3b | TPS51JL-3bR | AGCTTCTATTCTTGTGGTCCTTCG | SEQ ID NO: 834 |
| TPS51JL | 4 | TPS51JL-4F | GGTGGAGGCATACTAAACTTGG | SEQ ID NO: 835 |
| TPS51JL | 4 | TPS51JL-4R | TGAAAAGCTCTAATTCATCTAATGTTCC | SEQ ID NO: 836 |
| TPS51JL | 5 | TPS51JL-5F | GATGGGATGTGGAAATGATAAATGA | SEQ ID NO: 837 |
| TPS51JL | 5 | TPS51JL-5R | ATTTTGATGGTGATGTGTTGATCT | SEQ ID NO: 838 |
| TPS51JL | 6a | TPS51JL-6aF | CTACAAGAAGCAAAATGGTATTACAGTGG | SEQ ID NO: 839 |
| TPS51JL | 6a | TPS51JL-6aR | GCACAATAAGAACTGGTGCTCCC | SEQ ID NO: 840 |
| TPS51JL | 6b | TPS51JL-6bF | GGAGCACCAGTTCTTATTGTGC | SEQ ID NO: 841 |
| TPS51JL | 6b | TPS51JL-6bR | GCACTGTGACGAATTATGGTAGG | SEQ ID NO: 842 |
| TPS51JL | 7 | TPS51JL-7F | AAAGAGGTGATGCTCCGACG | SEQ ID NO: 843 |
| TPS51JL | 7 | TPS51JL-7R | AGATTATCCTGAGAACTGTGACC | SEQ ID NO: 844 |
| TPS52JL | 1 | TPS52JL-1F | TCAGAAGAGATCAGCAAACTATCAAC | SEQ ID NO: 845 |
| TPS52JL | 1 | TPS52JL-1R | CTTGAAAGGAGTAGAAAGTGATTGA | SEQ ID NO: 846 |
| TPS52JL | 2 | TPS52JL-2F | TGCAAAGACTTGGAATCTCTTACC | SEQ ID NO: 847 |
| TPS52JL | 2 | TPS52JL-2R | CATACACATTTTTGTTGGTGTTGC | SEQ ID NO: 848 |
| TPS52JL | 3 | TPS52JL-3F | GAGGCAATTTTATGGTGTCTTCC | SEQ ID NO: 849 |
| TPS52JL | 3 | TPS52JL-3R | TTGTTTTGTGTCTTGTCTCTTCC | SEQ ID NO: 850 |
| TPS52JL | 4 | TPS52JL-4F | GGACAATAGGAGTTTCATTTGAGCC | SEQ ID NO: 851 |
| TPS52JL | 4 | TPS52JL-4R | TCTCAACCACATTAGTGAAGAGC | SEQ ID NO: 852 |
| TPS52JL | 5 | TPS52JL-5F | TGGGATGTTAGTGCTATGAATGGG | SEQ ID NO: 853 |
| TPS52JL | 5 | TPS52JL-5R | GAGGCTTTTTCCTTTTAACACATCAAATGC | SEQ ID NO: 854 |
| TPS52JL | 6 | TPS52JL-6F | TAAGAGAAGCAAGATGGTATTATGATGG | SEQ ID NO: 855 |
| TPS52JL | 6 | TPS52JL-6R | GTATTATGGTAGGGTATCCATTAAAGC | SEQ ID NO: 856 |
| TPS52JL | 7 | TPS52JL-7F | CGTGTATGTGAAGAGAAAGCTCG | SEQ ID NO: 857 |
| TPS52JL | 7 | TPS52JL-7R | AGTACATGATCTTTTGTTTGGCG | SEQ ID NO: 858 |
| TPS53JL | 1 | TPS53JL-1F | CAGCCAACTTTGAACCATCCA | SEQ ID NO: 859 |
| TPS53JL | 1 | TPS53JL-1R | GCTTGAAAGAGACTGAACGAAA | SEQ ID NO: 860 |
| TPS53JL | 2 | TPS53JL-2F | CGACGAAGATGTGAAAAGGATGC | SEQ ID NO: 861 |
| TPS53JL | 2 | TPS53JL-2R | ACCATGTTGACGTAGAAGCC | SEQ ID NO: 862 |
| TPS53JL | 3a | TPS53JL-3aF | AGCTAGAATTTTCACAACTGAACG | SEQ ID NO: 863 |
| TPS53JL | 3a | TPS53JL-3aR | GCTTCTATTCTTGTGGTCCTTCG | SEQ ID NO: 864 |
| TPS53JL | 3b | TPS53JL-3bF | TACGATATTGAAGTAGTGAATCATGC | SEQ ID NO: 865 |
| TPS53JL | 3b | TPS53JL-3bR | TTGGCAAACTCAAGCAAAATAGG | SEQ ID NO: 866 |
| TPS53JL | 4 | TPS53JL-4F | TGGTGGAGGCATACTAAACTTGG | SEQ ID NO: 867 |
| TPS53JL | 4 | TPS53JL-4R | GTGAAAAGCTCTAATTCATCTAATGTTCC | SEQ ID NO: 868 |
| TPS53JL | 5 | TPS53JL-5F | GATGGGATGTGGAAATGATAAATGAA | SEQ ID NO: 869 |
| TPS53JL | 5 | TPS53JL-5R | ATTTTGATGGTGATTTGTTGATCTCT | SEQ ID NO: 870 |
| TPS53JL | 6a | TPS53JL-6aF | CTACAAGAAGCAAAATGGTACTACAGTGG | SEQ ID NO: 871 |
| TPS53JL | 6a | TPS53JL-6aR | GCACAATAAGAACTGGTGCTCCC | SEQ ID NO: 872 |
| TPS53JL | 6b | TPS53JL-6bF | GGAGCACCAGTTCTTATTGTGC | SEQ ID NO: 873 |
| TPS53JL | 6b | TPS53JL-6bR | GCACTGTGACGAATTATGGTAGG | SEQ ID NO: 874 |
| TPS53JL | 7 | TPS53JL-7F | AAGAGGTGATGCTCCGACG | SEQ ID NO: 875 |
| TPS53JL | 7 | TPS53JL-7R | TAGATTATCCTGAGAACTGTGACC | SEQ ID NO: 876 |
| TPS54JL | 1a | TPS54JL-1aF | ACAAAGAGAGTTATGTGAAGATTATTGAGC | SEQ ID NO: 877 |
| TPS54JL | 1a | TPS54JL-1aR | CCGAAAGCGAAGAGCATCAGC | SEQ ID NO: 878 |
| TPS54JL | 1b | TPS54JL-1bF | AATTACTTCATGGTCTTCAACCTTTGG | SEQ ID NO: 879 |
| TPS54JL | 1b | TPS54JL-1bR | CTATAAAATAGCCTTGTTCCCTAAGC | SEQ ID NO: 880 |
| TPS54JL | 2a | TPS54JL-2aF | AGCTTCACAAATGAGAGTTCGC | SEQ ID NO: 881 |
| TPS54JL | 2a | TPS54JL-2aR | CGGATAGGGTGCATTAGGGC | SEQ ID NO: 882 |
| TPS54JL | 2b | TPS54JL-2bF | ATGCACCCTATCCGAAAGAGC | SEQ ID NO: 883 |
| TPS54JL | 2b | TPS54JL-2bR | TTCCTTTTGATGTAGTTGTTGAAGC | SEQ ID NO: 884 |
| TPS54JL | 3 | TPS54JL-3F | ACAGAATAGTGGAGTGTTACATTTGG | SEQ ID NO: 885 |
| TPS54JL | 3 | TPS54JL-3R | ATAATAGTAAGCAAAGAAATCAACTTGG | SEQ ID NO: 886 |
| TPS54JL | 4 | TPS54JL-4F | TCATCAGGTGGGATATTTTTGCT | SEQ ID NO: 887 |
| TPS54JL | 4 | TPS54JL-4R | ACATAACTCGCGCAGAATGAA | SEQ ID NO: 888 |
| TPS54JL | 5 | TPS54JL-5F | GGATCTGAAGAGCTAATATCAATGGC | SEQ ID NO: 889 |
| TPS54JL | 5 | TPS54JL-5R | TCGTATAATGTTAGGTTGGGGC | SEQ ID NO: 890 |
| TPS54JL | 6 | TPS54JL-6F | TCAAAAGATGTAGTGGCTTCTGC | SEQ ID NO: 891 |
| TPS54JL | 6 | TPS54JL-6R | ATTAAGAGTGGTCTAGGAATAGCG | SEQ ID NO: 892 |
| TPS55JL | 1 | TPS55JL-1F | ACAAAAGGTTGAGGAATTAAAAGAGG | SEQ ID NO: 893 |
| TPS55JL | 1 | TPS55JL-1R | CCCACAAGGAAACATCATGC | SEQ ID NO: 894 |
| TPS55JL | 2 | TPS55JL-2F | CACACCTAAATGAGTTTTTGGCG | SEQ ID NO: 895 |
| TPS55JL | 2 | TPS55JL-2R | CCTGCTGATTTCACTAAGCTCC | SEQ ID NO: 896 |
| TPS55JL | 3 | TPS55JL-3F | TGTGGATGTTAGGAGTCTATTATGAACC | SEQ ID NO: 897 |
| TPS55JL | 3 | TPS55JL-3R | ATTTCTTGCCAAAGAGTATTGGGG | SEQ ID NO: 898 |
| TPS55JL | 4 | TPS55JL-4F | TTGTTATGAAGAGTTTGAGCAAGTG | SEQ ID NO: 899 |
| TPS55JL | 4 | TPS55JL-4R | CTCTATAAGTTTCTTCTTTTGTAAGCAC | SEQ ID NO: 900 |
| TPS55JL | 5 | TPS55JL-5F | GAAGCTCGATGGTTGAATAGTGG | SEQ ID NO: 901 |
| TPS55JL | 5 | TPS55JL-5R | CATGAGCCTACAAATAATAACAGATGC | SEQ ID NO: 902 |
| TPS55JL | 6 | TPS55JL-6F | AAATTAGCTTCACCCATATTACTTAGG | SEQ ID NO: 903 |
| TPS55JL | 6 | TPS55JL-6R | TGGGATCAATTAGCAAAGCAGC | SEQ ID NO: 904 |
| TPS56JL | 1 | TPS56JL-1F | TCCACTCAAATCTTAGCATCATCA | SEQ ID NO: 905 |
| TPS56JL | 1 | TPS56JL-1R | TGGATGAAATGTTTTTGTAGGACGA | SEQ ID NO: 906 |
| TPS56JL | 2 | TPS56JL-2F | GAAAAGGTTGAGGAATTAAAAGAAGTGG | SEQ ID NO: 907 |
| TPS56JL | 2 | TPS56JL-2R | GTTTCAAAATGATAAGACAATGCCAAACG | SEQ ID NO: 908 |
| TPS56JL | 3 | TPS56JL-3F | AAAATGTTTGGCAAGTGATACCC | SEQ ID NO: 909 |
| TPS56JL | 3 | TPS56JL-3R | GGGCCTCTCTAGGGCTCG | SEQ ID NO: 910 |
| TPS56JL | 4 | TPS56JL-4F | TAGGATTGTGGAATTGTACCTTTGG | SEQ ID NO: 911 |
| TPS56JL | 4 | TPS56JL-4R | TGCATCATAATCAGTAATTGAGGC | SEQ ID NO: 912 |
| TPS56JL | 5a | TPS56JL-5aF | AGGACGTTTTGAATTGTTATGAAGAGT | SEQ ID NO: 913 |
| TPS56JL | 5a | TPS56JL-5aR | TCTTTATGTTACTTCTTTTTCTAGCACT | SEQ ID NO: 914 |
| TPS56JL | 5b | TPS56JL-5bF | ACTCAATCAAGAATACATGCAAACAT | SEQ ID NO: 915 |
| TPS56JL | 5b | TPS56JL-5bR | GCACTTGCTCAAACTCTTCATAAC | SEQ ID NO: 916 |
| TPS56JL | 6a | TPS56JL-6aF | TGTTTGCATAGAGGACTCATCCC | SEQ ID NO: 917 |
| TPS56JL | 6a | TPS56JL-6aR | TCTTTCGATCTTTGGAGAGCC | SEQ ID NO: 918 |
| TPS56JL | 6b | TPS56JL-6bF | GTTTGCATAGAGGACTCATCCC | SEQ ID NO: 919 |
| TPS56JL | 6b | TPS56JL-6bR | AGTTTTCATTCCAACCAAAGAGC | SEQ ID NO: 920 |
| TPS56JL | 7a | TPS56JL-7aF | TGGTGTTTGTGAAGAAGAAGCC | SEQ ID NO: 921 |
| TPS56JL | 7a | TPS56JL-7aR | GGTGAAGCTACTTGAGTTGGC | SEQ ID NO: 922 |
| TPS56JL | 7b | TPS56JL-7bF | TTTGTGAAGCCAACTCAAGTAGC | SEQ ID NO: 923 |
| TPS56JL | 7b | TPS56JL-7bR | ATTGGATGAATAAGCAAAGCAGC | SEQ ID NO: 924 |
| TPS57JL | 1 | TPS57JL-1F | TCATCCTTTGGAAAACCCTTTGG | SEQ ID NO: 925 |
| TPS57JL | 1 | TPS57JL-1R | AAGCAACCGAAAGCAAAGAGC | SEQ ID NO: 926 |
| TPS57JL | 2 | TPS57JL-2F | CATATTCGACAAGTACAAGAATGAAAAAGG | SEQ ID NO: 927 |
| TPS57JL | 2 | TPS57JL-2R | CTCCATGAACTCTCATTTGTGC | SEQ ID NO: 928 |
| TPS57JL | 3 | TPS57JL-3F | GGAGTGCTATTTCTGGGTTTATGG | SEQ ID NO: 929 |
| TPS57JL | 3 | TPS57JL-3R | AGGCTCTAGTTCTTCAAGTGTACC | SEQ ID NO: 930 |
| TPS57JL | 5 | TPS57JL-5F | GTTGGGGTTGATAGTGCAGG | SEQ ID NO: 931 |
| TPS57JL | 5 | TPS57JL-5R | TCATTCATAACTCTTCCAACTATTGCC | SEQ ID NO: 932 |
| TPS57JL | 6 | TPS57JL-6F | GGAGCGGAAGAAATCATCAGG | SEQ ID NO: 933 |
| TPS57JL | 6 | TPS57JL-6R | TGGGTTGTGTAAAGCCATCTCC | SEQ ID NO: 934 |
| TPS58JL | 1 | TPS58JL-1F | ATTCAACGATTGGGGTTGTCTT | SEQ ID NO: 935 |
| TPS58JL | 1 | TPS58JL-1R | CCGAAAGCAAAGAGCATCAGC | SEQ ID NO: 936 |
| TPS58JL | 2 | TPS58JL-2F | CATATTCGACAAGTACAAGAATGAAAAAGG | SEQ ID NO: 937 |
| TPS58JL | 2 | TPS58JL-2R | CTCCATGAACTCTCATTTGTGC | SEQ ID NO: 938 |
| TPS58JL | 3a | TPS58JL-3aF | AGAATAGTGGAGTGCTATTTCTGG | SEQ ID NO: 939 |
| TPS58JL | 3a | TPS58JL-3aR | ATTATTAGTCTGATTTGGGAAGTTTCTGC | SEQ ID NO: 940 |
| TPS58JL | 3b | TPS58JL-3bF | TGGAGTGCTATTTCTGGGTTTATGG | SEQ ID NO: 941 |
| TPS58JL | 3b | TPS58JL-3bR | ATTTGGTGATTATTAGTCTGATTTGGG | SEQ ID NO: 942 |
| TPS58JL | 5 | TPS58JL-5F | GTTGGGGTTGATAGTGCAGG | SEQ ID NO: 943 |
| TPS58JL | 5 | TPS58JL-5R | TCATTCATAACTCTTCCAACTATTGCC | SEQ ID NO: 944 |
| TPS58JL | 6a | TPS58JL-6aF | GAAATTGTGGCTTCAACTGTGG | SEQ ID NO: 945 |
| TPS58JL | 6a | TPS58JL-6aR | GAGCAAAGTGGGTTGTGTAAAGC | SEQ ID NO: 946 |
| TPS58JL | 6b | TPS58JL-6bF | AGAAATCATCAGGAGAAATTGTGGC | SEQ ID NO: 947 |
| TPS58JL | 6b | TPS58JL-6bR | TGGGTTGTGTAAAGCCATCTCC | SEQ ID NO: 948 |
| TPS59JL | 1 | TPS59JL-1F | CACACAAATCTTAGTATCTTCAAATGACA | SEQ ID NO: 949 |
| TPS59JL | 1 | TPS59JL-1R | CAAATCTTGTTGTGAAATGTTGTAATG | SEQ ID NO: 950 |
| TPS59JL | 2 | TPS59JL-2F | AAAAGGTTGAGGAATTAAAAGAAGTGG | SEQ ID NO: 951 |
| TPS59JL | 2 | TPS59JL-2R | AGTTTCAAAATGATAAGACAATCCCAAACG | SEQ ID NO: 952 |
| TPS59JL | 3a | TPS59JL-3aF | TGAAAAATTCAAAGACGAGGATGGG | SEQ ID NO: 953 |
| TPS59JL | 3a | TPS59JL-3aR | CATTTAGGTGTGTTGTTGTGAAAGC | SEQ ID NO: 954 |
| TPS59JL | 3b | TPS59JL-3bF | ACTTGCTTTCACAACAACACACC | SEQ ID NO: 955 |
| TPS59JL | 3b | TPS59JL-3bR | AAGGGCCTCTCTAGGGCTCG | SEQ ID NO: 956 |
| TPS59JL | 3c | TPS59JL-3cF | ACACCATGAAGACGATGATCC | SEQ ID NO: 957 |
| TPS59JL | 3c | TPS59JL-3cR | ACCTGCTGACTTCACTAAGTTCC | SEQ ID NO: 958 |
| TPS59JL | 4 | TPS59JL-4F | AGATAGGATTGTGGAATTATACCTTTGG | SEQ ID NO: 959 |
| TPS59JL | 4 | TPS59JL-4R | AGCTCAAGTTCTTCAAGTGTACC | SEQ ID NO: 960 |
| TPS59JL | 5 | TPS59JL-5F | TTTGAATTGTTATGAAGAGTTTGAGC | SEQ ID NO: 961 |
| TPS59JL | 5 | TPS59JL-5R | TGTATTGTTCTTCTTTTTCTAGCACTT | SEQ ID NO: 962 |
| TPS59JL | 6 | TPS59JL-6F | ATTTGGATGAAGCTCGATGTTTGC | SEQ ID NO: 963 |
| TPS59JL | 6 | TPS59JL-6R | CCATGAGCCTACAAATAGTAACAGATGC | SEQ ID NO: 964 |
| TPS59JL | 7a | TPS59JL-7aF | TGAGGAACATTCAGCAGTGG | SEQ ID NO: 965 |
| TPS59JL | 7a | TPS59JL-7aR | GCTTCAAAAACTCTTCATTTATTTCTTTCC | SEQ ID NO: 966 |
| TPS59JL | 7b | TPS59JL-7bF | AAGAAATAAATGAAGAGTTTTTGAAGCC | SEQ ID NO: 967 |
| TPS59JL | 7b | TPS59JL-7bR | CCAACGTGTGTATAACCATCTCC | SEQ ID NO: 968 |
| TPS5FN | 1 | TPS5FN-1F | ATGTCACTATCAGGACTAATCTCC | SEQ ID NO: 969 |
| TPS5FN | 1 | TPS5FN-1R | AAAATGAGCATCCCACAATGG | SEQ ID NO: 970 |
| TPS5FN | 2 | TPS5FN-2F | AGCTATGGGAAAAGAATCAATGAGC | SEQ ID NO: 971 |
| TPS5FN | 2 | TPS5FN-2R | GAGTTTGAAATGAAGAGCAGTGG | SEQ ID NO: 972 |
| TPS5FN | 3 | TPS5FN-3F | GACGAGAAAAAGGAGTTCAAGG | SEQ ID NO: 973 |
| TPS5FN | 3 | TPS5FN-3R | TCATCAAGTATTGTTTGAGATGTTTGG | SEQ ID NO: 974 |
| TPS5FN | 4 | TPS5FN-4F | GCCGAAAAATGCTCACAAAGATTGG | SEQ ID NO: 975 |
| TPS5FN | 4 | TPS5FN-4R | CTTCCCAATGCGTGTTGAAAGAGG | SEQ ID NO: 976 |
| TPS5FN | 5 | TPS5FN-5F | ACCAACTTCCAGATTACATGAAGATA | SEQ ID NO: 977 |
| TPS5FN | 5 | TPS5FN-5R | TAGCACGTCATACGCCATTT | SEQ ID NO: 978 |
| TPS5FN | 6 | TPS5FN-6F | GAACCCTTAATTCTAGTCAATCTTTATTGC | SEQ ID NO: 979 |
| TPS5FN | 6 | TPS5FN-6R | TTCCTAAATCATCAACAAGTCGAGC | SEQ ID NO: 980 |
| TPS5FN | 7a | TPS5FN-7aF | TGAACTGAAAAGAGGAGACAATCC | SEQ ID NO: 981 |
| TPS5FN | 7a | TPS5FN-7aR | AATGGAGACTCACCCACTCG | SEQ ID NO: 982 |
| TPS5FN | 7b | TPS5FN-7bF | GCCATAGATTTCGTTAGGACAGC | SEQ ID NO: 983 |
| TPS5FN | 7b | TPS5FN-7bR | GGGAATGGAAGTGAAGAACAAGG | SEQ ID NO: 984 |
| TPS5JL | 1 | TPS5JL-1F | TCAAAGAACAACCAGCAATAGTCC | SEQ ID NO: 985 |
| TPS5JL | 1 | TPS5JL-1R | TTGGAGTGATTGGATAAAATGAGC | SEQ ID NO: 986 |
| TPS5JL | 2a | TPS5JL-2aF | GCTATGGGAAAAGAATCAATGAGC | SEQ ID NO: 987 |
| TPS5JL | 2a | TPS5JL-2aR | AGTTTGAAATGAAGAGCAGTGG | SEQ ID NO: 988 |
| TPS5JL | 2b | TPS5JL-2bF | TCTTGAGAAGGAGGCTGAAAATCC | SEQ ID NO: 989 |
| TPS5JL | 2b | TPS5JL-2bR | GGAGTTTGAAATGAAGAGCAGTGG | SEQ ID NO: 990 |
| TPS5JL | 3a | TPS5JL-3aF | GGAGAGTTTGAGTAAAGATGTGAAAGG | SEQ ID NO: 991 |
| TPS5JL | 3a | TPS5JL-3aR | TCCAACCTTTTCATTCTCCAATGC | SEQ ID NO: 992 |
| TPS5JL | 3b | TPS5JL-3bF | TTTGAGTAAAGATGTGAAAGGAATGG | SEQ ID NO: 993 |
| TPS5JL | 3b | TPS5JL-3bR | GATGTTTGGTTGTGAAATCTCTTGC | SEQ ID NO: 994 |
| TPS5JL | 4 | TPS5JL-4F | GAGCCACAGTTTAGATATTGCCG | SEQ ID NO: 995 |
| TPS5JL | 4 | TPS5JL-4R | AGAGGCTTAGCTCATCAAGCG | SEQ ID NO: 996 |
| TPS5JL | 5 | TPS5JL-5F | CGACCAACTTCCAGATTACATGAAG | SEQ ID NO: 997 |
| TPS5JL | 5 | TPS5JL-5R | AGCACGTCATACGCCATTTCA | SEQ ID NO: 998 |
| TPS5JL | 6a | TPS5JL-6aF | TGGAGGCAAATTGGTATCATAGTGG | SEQ ID NO: 999 |
| TPS5JL | 6a | TPS5JL-6aR | AAAGGTGGGATATTGAAGCAAGC | SEQ ID NO: 1000 |
| TPS5JL | 6b | TPS5JL-6bF | GAACCCTTAATTCTAGTCAATCTTTATTGC | SEQ ID NO: 1001 |
| TPS5JL | 6b | TPS5JL-6bR | TTCCTAAATCATCAACAAGTCGAGC | SEQ ID NO: 1002 |
| TPS5JL | 7a | TPS5JL-7aF | TGAACTGAAAAGAGGAGACAATCC | SEQ ID NO: 1003 |
| TPS5JL | 7a | TPS5JL-7aR | AATGGAGACTCACCCACTCG | SEQ ID NO: 1004 |
| TPS5JL | 7b | TPS5JL-7bF | TGGAAGGAAATGAATGAAGCTCG | SEQ ID NO: 1005 |
| TPS5JL | 7b | TPS5JL-7bR | ACCCCATCTTGCTCCTTTTGG | SEQ ID NO: 1006 |
| TPS60JL | 1 | TPS60JL-1F | GAGCTTGACTATGTTGAAAACCC | SEQ ID NO: 1007 |
| TPS60JL | 1 | TPS60JL-1R | ATAACCTTGTTGTCTAACCAATCG | SEQ ID NO: 1008 |
| TPS60JL | 2a | TPS60JL-2aF | GCTTCACAACTAAGAGTGCATGG | SEQ ID NO: 1009 |
| TPS60JL | 2a | TPS60JL-2aR | TAATGTCTAGCCTGTCTCCTTTGC | SEQ ID NO: 1010 |
| TPS60JL | 2b | TPS60JL-2bF | AACGATATTCGAGGAATGTTAAGC | SEQ ID NO: 1011 |
| TPS60JL | 2b | TPS60JL-2bR | AGGTTTTAGCTCCAGATTCGAGG | SEQ ID NO: 1012 |
| TPS60JL | 3 | TPS60JL-3F | TAATGGATTGTTACTTTTGGACTTTTGG | SEQ ID NO: 1013 |
| TPS60JL | 3 | TPS60JL-3R | GTATTGCTTCAGTTAAGAGGTGTAGC | SEQ ID NO: 1014 |
| TPS60JL | 5 | TPS60JL-5F | TCAACTACCAGAGTACATTCAACC | SEQ ID NO: 1015 |
| TPS60JL | 5 | TPS60JL-5R | GCAATATGATTTGTCCTTAGTAAATTCTCC | SEQ ID NO: 1016 |
| TPS60JL | 6 | TPS60JL-6F | CACTTGTTACTGCTGCTTCTCC | SEQ ID NO: 1017 |
| TPS60JL | 6 | TPS60JL-6R | GCCAATGTCGTTAAGAACTCTACC | SEQ ID NO: 1018 |
| TPS60JL | 7 | TPS60JL-7F | TCTGAATGAAGAGTGTCTCTATCCC | SEQ ID NO: 1019 |
| TPS60JL | 7 | TPS60JL-7R | AGCTTCTCTTGTAAAACCATCTCC | SEQ ID NO: 1020 |
| TPS61JL | 1a | TPS61JL-1aF | ATCATCGAAATTGAAAGACACAGG | SEQ ID NO: 1021 |
| TPS61JL | 1a | TPS61JL-1aR | GGGCAAGATAGTTGCTCTGC | SEQ ID NO: 1022 |
| TPS61JL | 1b | TPS61JL-1bF | GAGCAACTATCTTGCCCAACC | SEQ ID NO: 1023 |
| TPS61JL | 1b | TPS61JL-1bR | TCATATTTGTTGTTAAGAGACTCCAGG | SEQ ID NO: 1024 |
| TPS61JL | 2 | TPS61JL-2F | AGCTTATCGAGGATGTGAGGC | SEQ ID NO: 1025 |
| TPS61JL | 2 | TPS61JL-2R | TCCATGAAGCCTAAGAAGCC | SEQ ID NO: 1026 |
| TPS61JL | 3 | TPS61JL-3F | TGTTTCACAAGGCATATTTGTTGG | SEQ ID NO: 1027 |
| TPS61JL | 3 | TPS61JL-3R | AGTTCCAAAGCATGAACCACC | SEQ ID NO: 1028 |
| TPS61JL | 4 | TPS61JL-4F | GTTGGTGGAAGAATGTGGGC | SEQ ID NO: 1029 |
| TPS61JL | 4 | TPS61JL-4R | GGCATTGGTGAAGTGTCTGAGC | SEQ ID NO: 1030 |
| TPS61JL | 5 | TPS61JL-5F | TGTACGGGAAACTGAAAAACTTCC | SEQ ID NO: 1031 |
| TPS61JL | 5 | TPS61JL-5R | CCCTTTAGATGAGGTAAAACTAACTTGC | SEQ ID NO: 1032 |
| TPS61JL | 6 | TPS61JL-6F | GCTTGGATTTCATCTTCGGGC | SEQ ID NO: 1033 |
| TPS61JL | 6 | TPS61JL-6R | CGCTGAAGTTCCTAAATCGTTGC | SEQ ID NO: 1034 |
| TPS61JL | 7 | TPS61JL-7F | CCTCTCATTCCCAATAAGTAAACTAGC | SEQ ID NO: 1035 |
| TPS61JL | 7 | TPS61JL-7R | TCCTCAAAGTACAGGAGACATCG | SEQ ID NO: 1036 |
| TPS62JL | 1 | TPS62JL-1F | TTGATGCTATTCAACGGCTAGG | SEQ ID NO: 1037 |
| TPS62JL | 1 | TPS62JL-1R | CAGCAGGAACGAAGTGACCG | SEQ ID NO: 1038 |
| TPS62JL | 2 | TPS62JL-2F | ATATGAAGCCTCCCATCTATGC | SEQ ID NO: 1039 |
| TPS62JL | 2 | TPS62JL-2R | TGGGATAGACACCAAAAAGGTCC | SEQ ID NO: 1040 |
| TPS62JL | 3 | TPS62JL-3F | GGTGGCGAGACATTGGTTTAGC | SEQ ID NO: 1041 |
| TPS62JL | 3 | TPS62JL-3R | ATGGATTTTGTAAGCGCAACCC | SEQ ID NO: 1042 |
| TPS62JL | 4 | TPS62JL-4F | TATAGAAAAACTTCCAGACTCCATGA | SEQ ID NO: 1043 |
| TPS62JL | 4 | TPS62JL-4R | TAAAGGGCTCCATCCACGC | SEQ ID NO: 1044 |
| TPS62JL | 5 | TPS62JL-5F | GGGCAAGTTTGTGCGAAGC | SEQ ID NO: 1045 |
| TPS62JL | 5 | TPS62JL-5R | TGGCACTACCAAAGTCATCCC | SEQ ID NO: 1046 |
| TPS62JL | 6a | TPS62JL-6aF | AGGACATGACGGATCTTATGTGG | SEQ ID NO: 1047 |
| TPS62JL | 6a | TPS62J L -6aR | AGGAATGGTGGTGGAAACGC | SEQ ID NO: 1048 |
| TPS62JL | 6b | TPS62JL-6bF | TCCACCACCATTCCTCAAAGC | SEQ ID NO: 1049 |
| TPS62JL | 6b | TPS62JL-6bR | ATGTTCTTCCAAGTGGGGTAGG | SEQ ID NO: 1050 |
| TPS63JL | 1 | TPS63JL-1F | GAACTTGGTCAACGCTGTGC | SEQ ID NO: 1051 |
| TPS63JL | 1 | TPS63JL-1R | ACCTCCTTGTCTCAGTAATCGG | SEQ ID NO: 1052 |
| TPS63JL | 2a | TPS63JL-2aF | TAGTGGAAGAAGACAGAGAGGG | SEQ ID NO: 1053 |
| TPS63JL | 2a | TPS63JL-2aR | AGTGTTGGCTGAGAAACTGTCC | SEQ ID NO: 1054 |
| TPS63JL | 2b | TPS63JL-2bF | TCTCAGCCAACACTGCTACC | SEQ ID NO: 1055 |
| TPS63JL | 2b | TPS63JL-2bR | GAGACTTGAACAATTTCCCTTTGG | SEQ ID NO: 1056 |
| TPS63JL | 3 | TPS63JL-3F | GGTGGAAAGAGCTTGGTTTGG | SEQ ID NO: 1057 |
| TPS63JL | 3 | TPS63JL-3R | GAGTGAGTTCGTCTAGTGTCC | SEQ ID NO: 1058 |
| TPS63JL | 4 | TPS63JL-4F | GGGAAATTAAAGAGCAGTTACCCG | SEQ ID NO: 1059 |
| TPS63JL | 4 | TPS63JL-4R | GGGTTCCATCCATGTTTTCTGT | SEQ ID NO: 1060 |
| TPS63JL | 5a | TPS63JL-5aF | GGTTTGGTTGTGGGAAGTTGC | SEQ ID NO: 1061 |
| TPS63JL | 5a | TPS63JL-5aR | CTGCTGTAGAAGACACAAGGC | SEQ ID NO: 1062 |
| TPS63JL | 5b | TPS63JL-5bF | GAACGCGATTGTGAGTTCTGG | SEQ ID NO: 1063 |
| TPS63JL | 5b | TPS63JL-5bR | GGCACTTCCTAAGTCATCCC | SEQ ID NO: 1064 |
| TPS63JL | 6a | TPS63JL-6aF | ATGGGCATGATGGGTCTTACG | SEQ ID NO: 1065 |
| TPS63JL | 6a | TPS63JL-6aR | CTCCTTATTGAGGCGTTCCC | SEQ ID NO: 1066 |
| TPS63JL | 6b | TPS63JL-6bF | GCAAGGGAGCAAGTGATTCG | SEQ ID NO: 1067 |
| TPS63JL | 6b | TPS63JL-6bR | CTGGAGGCTTGGAAGGCG | SEQ ID NO: 1068 |
| TPS64JL | 1 | TPS64JL-1F | ACTCGGCTACTTTCTCAAAGAGG | SEQ ID NO: 1069 |
| TPS64JL | 1 | TPS64JL-1R | ATGGATTACCAAAACGAGGAAGC | SEQ ID NO: 1070 |
| TPS64JL | 2a | TPS64JL-2aF | AGGCTCATAGATAGCATCCAACGG | SEQ ID NO: 1071 |
| TPS64JL | 2a | TPS64JL-2aR | GTAGCCGAAAACGAAGCCCC | SEQ ID NO: 1072 |
| TPS64JL | 2b | TPS64JL-2bF | TCCTTCAGATGTTGTCAGATTTCAATTCC | SEQ ID NO: 1073 |
| TPS64JL | 2b | TPS64JL-2bR | GAGGTAGTTGGAAAGCCATTATGC | SEQ ID NO: 1074 |
| TPS64JL | 3a | TPS64JL-3aF | ATGCTGAGCTTGTATGAGGC | SEQ ID NO: 1075 |
| TPS64JL | 3a | TPS64JL-3aR | CAAGAAGAGCAGGGCAGTGG | SEQ ID NO: 1076 |
| TPS64JL | 3b | TPS64JL-3bF | GACACCTGAGGATGGCACC | SEQ ID NO: 1077 |
| TPS64JL | 3b | TPS64JL-3bR | TTGTGGAGTGACTGAAGCTCG | SEQ ID NO: 1078 |
| TPS64JL | 4 | TPS64JL-4F | GTGGAAACAGTTGGGTCTGG | SEQ ID NO: 1079 |
| TPS64JL | 4 | TPS64JL-4R | GTGGAGTTCATCCAAAGATCCG | SEQ ID NO: 1080 |
| TPS64JL | 5 | TPS64JL-5F | GATGGGATCTTGGTGCAATGG | SEQ ID NO: 1081 |
| TPS64JL | 5 | TPS64JL-5R | ACATATTTTCATGTACTCAGGAAGC | SEQ ID NO: 1082 |
| TPS64JL | 6 | TPS64JL-6F | TGAAATTGGCTACAGAGTTCTCA | SEQ ID NO: 1083 |
| TPS64JL | 6 | TPS64JL-6R | AGTGTTGTGTAACGCATAATCCA | SEQ ID NO: 1084 |
| TPS64JL | 7a | TPS64JL-7aF | GCATTTCTAACCGAAGCAGAATGG | SEQ ID NO: 1085 |
| TPS64JL | 7a | TPS64JL-7aR | TGGCTGTTCCCAAATCATCCC | SEQ ID NO: 1086 |
| TPS64JL | 7b | TPS64JL-7bF | CACTCATTTTTCCTCATAGGTCATGG | SEQ ID NO: 1087 |
| TPS64JL | 7b | TPS64JL-7bR | TTGGCTGTTCCCAAATCATCCC | SEQ ID NO: 1088 |
| TPS64JL | 8a | TPS64JL-8aF | AGAGAGGAGATGTTGCTTCTAGC | SEQ ID NO: 1089 |
| TPS64JL | 8a | TPS64JL-8aR | AAGGTCAAAACAGGCCGTGG | SEQ ID NO: 1090 |
| TPS64JL | 8b | TPS64JL-8bF | AGCTCGTGGATAGAGCTAAACG | SEQ ID NO: 1091 |
| TPS64JL | 8b | TPS64JL-8bR | CCATGTTGATAGATGACTTGGGC | SEQ ID NO: 1092 |
| TPS6FN | 1 | TPS6FN-1F | ATGCTACCCCATCCAATGTGC | SEQ ID NO: 1093 |
| TPS6FN | 1 | TPS6FN-1R | AATATAATCGAAAGACCAAATGGAGGGC | SEQ ID NO: 1094 |
| TPS6FN | 2 | TPS6FN-2F | TTAGTTGAGATGGAAAACTCTTTAGC | SEQ ID NO: 1095 |
| TPS6FN | 2 | TPS6FN-2R | ATAGCCATGTTGACGTAGAAGC | SEQ ID NO: 1096 |
| TPS6FN | 3 | TPS6FN-3F | TCCCACTTCATCGGAGGACC | SEQ ID NO: 1097 |
| TPS6FN | 3 | TPS6FN-3R | TTGGCTAACTCAAGCAACATAGG | SEQ ID NO: 1098 |
| TPS6FN | 4 | TPS6FN-4F | GGTGGAGACATACTAAACTTGGAGA | SEQ ID NO: 1099 |
| TPS6FN | 4 | TPS6FN-4R | GCTTTGGTGAAAAGCTCTAATTCAT | SEQ ID NO: 1100 |
| TPS6FN | 5 | TPS6FN-5F | ATGAGTTACCAGAATACATGAAGATGC | SEQ ID NO: 1101 |
| TPS6FN | 5 | TPS6FN-5R | GGTATTGAATGTTGATGGAGATTTCTTGG | SEQ ID NO: 1102 |
| TPS6FN | 6a | TPS6FN-6aF | GGTCGATATGTGTAAAAGTTTCTTGC | SEQ ID NO: 1103 |
| TPS6FN | 6a | TPS6FN-6aR | ACTGGTGCTCCTACTGAAATCC | SEQ ID NO: 1104 |
| TPS6FN | 6b | TPS6FN-6bF | AATGGTTGGATTTCAGTAGGAGC | SEQ ID NO: 1105 |
| TPS6FN | 6b | TPS6FN-6bR | TGGCACTGTGACGAATAATGG | SEQ ID NO: 1106 |
| TPS6FN | 7a | TPS6FN-7aF | ATTGAAAAGAGGTGATGCTCCG | SEQ ID NO: 1107 |
| TPS6FN | 7a | TPS6FN-7aR | TTGGATTGATTATCTTGAGAACTATGACC | SEQ ID NO: 1108 |
| TPS6FN | 7b | TPS6FN-7bF | ATTGTATCTGAAGAGGAAGCTCG | SEQ ID NO: 1109 |
| TPS6FN | 7b | TPS6FN-7bR | TATAAGGGAATAGGTTCAATAATCAAGG | SEQ ID NO: 1110 |
| TPS6JL | 1 | TPS6JL-1F | ATGTGCTGTGGTCAATAGTTCT | SEQ ID NO: 1111 |
| TPS6JL | 1 | TPS6JL-1R | AAAGACCAAATGGAGGGCTCA | SEQ ID NO: 1112 |
| TPS6JL | 2 | TPS6JL-2F | ACAGGTCGAGTCAAAGAATTGG | SEQ ID NO: 1113 |
| TPS6JL | 2 | TPS6JL-2R | GCCATGTTGACGTAGAAGCC | SEQ ID NO: 1114 |
| TPS6JL | 3a | TPS6JL-3aF | CTCCCACTTCATTGGAGGACT | SEQ ID NO: 1115 |
| TPS6JL | 3a | TPS6JL-3aR | AGCAAACTCAAGCAAAATAGGATT | SEQ ID NO: 1116 |
| TPS6JL | 3b | TPS6JL-3bF | GCTAAGTGGTTCATCGACGC | SEQ ID NO: 1117 |
| TPS6JL | 3b | TPS6JL-3bR | TGATGTGTTGATTGTATCATGTTGA | SEQ ID NO: 1118 |
| TPS6JL | 4 | TPS6JL-4F | GGTGGAGGCATACTAAACTTGG | SEQ ID NO: 1119 |
| TPS6JL | 4 | TPS6JL-4R | GAAAAGCTCTAATTCATCCAATGTTCC | SEQ ID NO: 1120 |
| TPS6JL | 5 | TPS6JL-5F | GATGGGATATGGAAATGATAAATGAGT | SEQ ID NO: 1121 |
| TPS6JL | 5 | TPS6JL-5R | TGTTGATGGAGATGTGTTGGTCT | SEQ ID NO: 1122 |
| TPS6JL | 6 | TPS6JL-6F | GATTTCAGTGGGAGCACCG | SEQ ID NO: 1123 |
| TPS6JL | 6 | TPS6JL-6R | ACTATGACGAATTATGGCGGG | SEQ ID NO: 1124 |
| TPS6JL | 7 | TPS6JL-7F | GAACTGAAAAGAGGTGATGCTCC | SEQ ID NO: 1125 |
| TPS6JL | 7 | TPS6JL-7R | TTTGGATTGATTATCTTGAGAACTATGACC | SEQ ID NO: 1126 |
| TPS6-likeJL | 1 | TPS6-likeJL-1F | ATGCTACCCCATCCAATGTGC | SEQ ID NO: 1127 |
| TPS6-likeJL | 1 | TPS6-likeJL-1R | AATATAATCAAAAGACCAAATGGAGGGC | SEQ ID NO: 1128 |
| TPS6-likeJL | 2 | TPS6-likeJL-2F | CAACTTGAACTCATTGATACATTGC | SEQ ID NO: 1129 |
| TPS6-likeJL | 2 | TPS6-likeJL-2R | TAGCCATGTTGACGTAGAAGCC | SEQ ID NO: 1130 |
| TPS6-likeJL | 3 | TPS6-likeJL-3F | AGCTCCCACTTCATCGGAGG | SEQ ID NO: 1131 |
| TPS6-likeJL | 3 | TPS6-likeJL-3R | TTTGGCTAACTCAAGCAACATAGG | SEQ ID NO: 1132 |
| TPS6-likeJL | 4 | TPS6-likeJL-4F | GGTGGAGACATACTAAACTTGGAGA | SEQ ID NO: 1133 |
| TPS6-likeJL | 4 | TPS6-likeJL-4R | GCTTTGGTGAAAAGCTCTAATTCAT | SEQ ID NO: 1134 |
| TPS6-likeJL | 5 | TPS6-likeJL-5F | AGTTACCAGAATACATGAAGATGCC | SEQ ID NO: 1135 |
| TPS6-likeJL | 5 | TPS6-likeJL-5R | TTCTTGGTCTCTTAACACCTCAAA | SEQ ID NO: 1136 |
| TPS6-likeJL | 6a | TPS6-likeJL-6aF | GGTCGATATGTGTAAAAGTTTCTTGC | SEQ ID NO: 1137 |
| TPS6-likeJL | 6a | TPS6-likeJL-6aR | ACTGGTGCTCCTACTGAAATCC | SEQ ID NO: 1138 |
| TPS6-likeJL | 6b | TPS6-likeJL-6bF | GAAAATGGTTGGATTTCAGTAGGAGC | SEQ ID NO: 1139 |
| TPS6-likeJL | 6b | TPS6-likeJL-6bR | TGGCACTGTGACGAATAATGGC | SEQ ID NO: 1140 |
| TPS6-likeJL | 7 | TPS6-likeJL-7F | AATTGAAAAGAGGTGATGCTCCG | SEQ ID NO: 1141 |
| TPS6-likeJL | 7 | TPS6-likeJL-7R | TTTGGATTGATTATCTTGAGAACTATGACC | SEQ ID NO: 1142 |
| TPS7FN | 1 | TPS7FN-1F | AGTCAAGTGTTAGCTTCATCTCA | SEQ ID NO: 1143 |
| TPS7FN | 1 | TPS7FN-1R | CGCCCCAAATAGAAGGGTGA | SEQ ID NO: 1144 |
| TPS7FN | 2 | TPS7FN-2F | GAGAGTGAAATTGAGAAATTGTTGG | SEQ ID NO: 1145 |
| TPS7FN | 2 | TPS7FN-2R | TGTCTTAATAATCTAAACCAAAGAGAAGC | SEQ ID NO: 1146 |
| TPS7FN | 3a | TPS7FN-3aF | TGATAACCGACGTTTCGGG | SEQ ID NO: 1147 |
| TPS7FN | 3a | TPS7FN-3aR | CTAGCATGAAGCCTCTCTAAGG | SEQ ID NO: 1148 |
| TPS7FN | 3b | TPS7FN-3bF | GGAAAGGCCACTAAGAATGACC | SEQ ID NO: 1149 |
| TPS7FN | 3b | TPS7FN-3bR | ACCTCACAATTTCACTAAGCTCC | SEQ ID NO: 1150 |
| TPS7FN | 4 | TPS7FN-4F | GTGGAAGGAGCATGAGTTTGC | SEQ ID NO: 1151 |
| TPS7FN | 4 | TPS7FN-4R | TGACTTTGGTTAGAAGTTTTCTTGC | SEQ ID NO: 1152 |
| TPS7FN | 6a | TPS7FN-6aF | GAAGAAGCTCGATGGTTAAATGAAGG | SEQ ID NO: 1153 |
| TPS7FN | 6a | TPS7FN-6aR | AGTAGAAGCTGAAACAATCTTAGGG | SEQ ID NO: 1154 |
| TPS7FN | 6b | TPS7FN-6bF | TCTGGTTACGTTTTGTTGATAGC | SEQ ID NO: 1155 |
| TPS7FN | 6b | TPS7FN-6bR | TGAATCTTGAGAGGAGAGTAGAAGC | SEQ ID NO: 1156 |
| TPS7FN | 7 | TPS7FN-7F | TGAAGCAATATGAGGTTTCAGAGG | SEQ ID NO: 1157 |
| TPS7FN | 7 | TPS7FN-7R | ATGGGATGGGATCTATAAGTAAAGC | SEQ ID NO: 1158 |
| TPS8FN | 1 | TPS8FN-1F | AAGTCTTAGCTTCATCTCAATTATGTGAC | SEQ ID NO: 1159 |
| TPS8FN | 1 | TPS8FN-1R | TCGATCACCCCAAATAGAAGGG | SEQ ID NO: 1160 |
| TPS8FN | 2 | TPS8FN-2F | CGAGAGTGAAATCGAGAAATTATTGG | SEQ ID NO: 1161 |
| TPS8FN | 2 | TPS8FN-2R | CACTTTGTCTTAATAGTCTGAACCG | SEQ ID NO: 1162 |
| TPS8FN | 3 | TPS8FN-3F | AGCTTGTATGAGGCTTCGC | SEQ ID NO: 1163 |
| TPS8FN | 3 | TPS8FN-3R | TCTCTATGGTCTTTCTTAATGGCG | SEQ ID NO: 1164 |
| TPS8FN | 4 | TPS8FN-4F | GGTGGAACTGTATTTTTGGATATTGGG | SEQ ID NO: 1165 |
| TPS8FN | 4 | TPS8FN-4R | ACCTTTGAATTGCTTTGGTAAGAAGC | SEQ ID NO: 1166 |
| TPS8FN | 6a | TPS8FN-6aF | GAAGCTCGATGGTTGAATGAAGG | SEQ ID NO: 1167 |
| TPS8FN | 6a | TPS8FN-6aR | GCGAGAGCCTATGTCATCC | SEQ ID NO: 1168 |
| TPS8FN | 6b | TPS8FN-6bF | TGTGGTTACGTTATGTTGATAGCC | SEQ ID NO: 1169 |
| TPS8FN | 6b | TPS8FN-6bR | AATCTTGATAGGAGAGTGGAAGC | SEQ ID NO: 1170 |
| TPS8FN | 7 | TPS8FN-7F | GTTTGAGCAAGAGAGAAATCACATACC | SEQ ID NO: 1171 |
| TPS8FN | 7 | TPS8FN-7R | TGTAAAATTAAGAACACGAACTAAGATAGG | SEQ ID NO: 1172 |
| TPS8JL | 1 | TPS8JL-1F | TCAAGTCTTAGCTTCATCTCAATTATGT | SEQ ID NO: 1173 |
| TPS8JL | 1 | TPS8JL-1R | TCGATCACCCCAAATAGAAGG | SEQ ID NO: 1174 |
| TPS8JL | 2 | TPS8JL-2F | TTTGAGAGTGAAATTGAGAAATTGTTGG | SEQ ID NO: 1175 |
| TPS8JL | 2 | TPS8JL-2R | TAAATCCATGTTGTCTTAATAATCTAAACC | SEQ ID NO: 1176 |
| TPS8JL | 3a | TPS8JL-3aF | GACGCTGAAGGTAATTTTAAGAAAAGC | SEQ ID NO: 1177 |
| TPS8JL | 3a | TPS8JL-3aR | AAGGTGAGTGGTTGTGAAAGC | SEQ ID NO: 1178 |
| TPS8JL | 3b | TPS8JL-3bF | GCTTCACACTTGAGTTATGTTGG | SEQ ID NO: 1179 |
| TPS8JL | 3b | TPS8JL-3bR | CTCTCTATGGTCTTTCTTAGAGGC | SEQ ID NO: 1180 |
| TPS8JL | 4 | TPS8JL-4F | AGGATGGTGGAACTGTATTTTITGG | SEQ ID NO: 1181 |
| TPS8JL | 4 | TPS8JL-4R | CCTTTGAATTGCTTTGGTAAGAAGC | SEQ ID NO: 1182 |
| TPS8JL | 6 | TPS8JL-6F | GAAGAAGCTCGATGGTTGAATGAAGG | SEQ ID NO: 1183 |
| TPS8JL | 6 | TPS8JL-6R | AGAGTGGAAGCTGAAACAATCTTAGG | SEQ ID NO: 1184 |
| TPS8JL | 7a | TPS8JL-7aF | TGAGCAACAGAGAAATCACATACC | SEQ ID NO: 1185 |
| TPS8JL | 7a | TPS8JL-7aR | GAACACGAAGTAAGATAGGAAAAGGC | SEQ ID NO: 1186 |
| TPS8JL | 7b | TPS8JL-7bF | GTGCCTTTTCCTATCTTACTTCG | SEQ ID NO: 1187 |
| TPS8JL | 7b | TPS8JL-7bR | CAATGCTTTCTTTGAGCACTTTTCC | SEQ ID NO: 1188 |
| TPS8-likeJL | 2 | TPS8-likeJL-2F | TTTGAGAGTGAAATTGAGAAATTGTTGG | SEQ ID NO: 1189 |
| TPS8-likeJL | 2 | TPS8-likeJL-2R | TAAATCCATGTTGTCTTAATAATCTAAACC | SEQ ID NO: 1190 |
| TPS8-likeJL | 3a | TPS8-likeJL-3aF | GCTTGATAACCGATGTTTCGGG | SEQ ID NO: 1191 |
| TPS8-likeJL | 3a | TPS8-likeJL-3aR | GAGGTGAGTGGTTGTGAAAGC | SEQ ID NO: 1192 |
| TPS8-likeJL | 3b | TPS8-likeJL-3bF | TCACCTCAAGGCTATTGTGGC | SEQ ID NO: 1193 |
| TPS8-likeJL | 3b | TPS8-likeJL-3bR | AGATGTAAAACCTAGCATGAAGCC | SEQ ID NO: 1194 |
| TPS8-likeJL | 4 | TPS8-likeJL-4F | GGTGGAAGGAGCATGAGTTTGC | SEQ ID NO: 1195 |
| TPS8-likeJL | 4 | TPS8-likeJL-4R | TTGAGGCTAATGCAATGACTTTGG | SEQ ID NO: 1196 |
| TPS8-likeJL | 5 | TPS8-likeJL-5F | GGGACATAAATTGTCTGGATAAACTTGA | SEQ ID NO: 1197 |
| TPS8-likeJL | 5 | TPS8-likeJL-5R | TTTTTAAGCTCCTTTTCAAATTCTTCATAA | SEQ ID NO: 1198 |
| TPS8-likeJL | 6 | TPS8-likeJL-6F | AGCTCGATGGTTGAGTGAAGG | SEQ ID NO: 1199 |
| TPS8-likeJL | 6 | TPS8-likeJL-6R | ACCTAGCAAGTAGAGTGGAAGC | SEQ ID NO: 1200 |
| TPS8-likeJL | 7a | TPS8-likeJL-7aF | TGAGCAAAAGAGAAATCACATACC | SEQ ID NO: 1201 |
| TPS8-likeJL | 7a | TPS8-likeJL-7aR | TTTCTTTCCAGTGGGTGTCC | SEQ ID NO: 1202 |
| TPS8-likeJL | 7b | TPS8-likeJL-7bF | TATGGGGTATCAGAGAAAGAGGC | SEQ ID NO: 1203 |
| TPS8-likeJL | 7b | TPS8-likeJL-7bR | GAACACGAACTAAGATAGGAAAAGGC | SEQ ID NO: 1204 |
| TPS8-likeJL | 7c | TPS8-likeJL-7cF | GTGCCTTTTCCTATCTTAGTTCG | SEQ ID NO: 1205 |
| TPS8-likeJL | 7c | TPS8-likeJL-7cR | CAATGCTTTCTTTGAGCACTTTTCC | SEQ ID NO: 1206 |
| TPS9FN | 1 | TPS9FN-1F | TCCACTCAAATCTTAGCAACCTC | SEQ ID NO: 1207 |
| TPS9FN | 1 | TPS9FN-1R | TGCAAAAATCGGTCTCCCCA | SEQ ID NO: 1208 |
| TPS9FN | 2a | TPS9FN-2aF | TGAAGTTAATTGATGTGGTAGAACG | SEQ ID NO: 1209 |
| TPS9FN | 2a | TPS9FN-2aR | AGAAACCCTATATCCATGTTGTCG | SEQ ID NO: 1210 |
| TPS9FN | 2b | TPS9FN-2bF | CAAGTTGAAGAATTGAAAGAAGTGG | SEQ ID NO: 1211 |
| TPS9FN | 2b | TPS9FN-2bR | AAATGATAGGACAATCCCAAACG | SEQ ID NO: 1212 |
| TPS9FN | 3a | TPS9FN-3aF | GCGAGTGACACCGTTGGTT | SEQ ID NO: 1213 |
| TPS9FN | 3a | TPS9FN-3aR | TGGATCATCATTGGGGTGTTCTTT | SEQ ID NO: 1214 |
| TPS9FN | 3b | TPS9FN-3bF | AAAGAACACCCCAATGATGATCC | SEQ ID NO: 1215 |
| TPS9FN | 3b | TPS9FN-3bR | GGGTCTTTCTTAAGGGCCTC | SEQ ID NO: 1216 |
| TPS9FN | 4 | TPS9FN-4F | TGGTGGAAGGAATTAGACAGTGC | SEQ ID NO: 1217 |
| TPS9FN | 4 | TPS9FN-4R | ATCAGCGATTGAGGAAAGTGC | SEQ ID NO: 1218 |
| TPS9FN | 5 | TPS9FN-5F | GATAAACTCCATCCAGAATACTTGC | SEQ ID NO: 1219 |
| TPS9FN | 5 | TPS9FN-5R | ACTTTGTAAGTTTCCTCCTTTTCAA | SEQ ID NO: 1220 |
| TPS9FN | 6a | TPS9FN-6aF | GAAGCTCGATGGTTGAATGAAGG | SEQ ID NO: 1221 |
| TPS9FN | 6a | TPS9FN-6aR | CGCTTGCCCTAACAATCTTGG | SEQ ID NO: 1222 |
| TPS9FN | 6b | TPS9FN-6bF | GTTGATGGCTTGCTCTTTAGTTGG | SEQ ID NO: 1223 |
| TPS9FN | 6b | TPS9FN-6bR | TGTGACCAGCCACGTCATCC | SEQ ID NO: 1224 |
| TPS9FN | 7 | TPS9FN-7F | TGTGATGAAATGAATAGGCGAGTGG | SEQ ID NO: 1225 |
| TPS9FN | 7 | TPS9FN-7R | CCATAACCCTAGCAAGATTCAGAGC | SEQ ID NO: 1226 |
| TPS9JL | 1 | TPS9JL-1F | TCAAGTTTTAGCCTCATCACAAAA | SEQ ID NO: 1227 |
| TPS9JL | 1 | TPS9JL-1R | CCCAAATAGAAGGTTGATAAGTTGT | SEQ ID NO: 1228 |
| TPS9JL | 2 | TPS9JL-2F | GCAGCGAGTTGACGAATTAAAGG | SEQ ID NO: 1229 |
| TPS9JL | 2 | TPS9JL-2R | TGAAACCATAAATCCATGTTGGC | SEQ ID NO: 1230 |
| TPS9JL | 3a | TPS9JL-3aF | TGCTTGATAACTGACATTCCCG | SEQ ID NO: 1231 |
| TPS9JL | 3a | TPS9JL-3aR | AAGGTGAGTGGTGGTGAAAGC | SEQ ID NO: 1232 |
| TPS9JL | 3b | TPS9JL-3bF | AGTGCTTGATAACTGACATTCCC | SEQ ID NO: 1233 |
| TPS9JL | 3b | TPS9JL-3bR | ATGAAATGTAATGCCTAGCGTGG | SEQ ID NO: 1234 |
| TPS9JL | 4 | TPS9JL-4F | TGCAAGAGATAGGATTGTGGAGC | SEQ ID NO: 1235 |
| TPS9JL | 4 | TPS9JL-4R | TCTGCAACTGAGGCCAATGC | SEQ ID NO: 1236 |
| TPS9JL | 5 | TPS9JL-5F | ACTTAAATTGTGCGGATCAACTACG | SEQ ID NO: 1237 |
| TPS9JL | 5 | TPS9JL-5R | GTAAACTTTGTAACTTTCCTCCTTTCC | SEQ ID NO: 1238 |
| TPS9JL | 6 | TPS9JL-6F | TCAGTGAAGCTCGATGGTTGC | SEQ ID NO: 1239 |
| TPS9JL | 6 | TPS9JL-6R | TGCAATCTCTCATTATCTTGGGG | SEQ ID NO: 1240 |
| TPS9JL | 7 | TPS9JL-7F | GAGATCATTCACCGTCTACCG | SEQ ID NO: 1241 |
| TPS9JL | 7 | TPS9JL-7R | TTTTTGTCTCTTTTCCAACATGCG | SEQ ID NO: 1242 |
| TPS9-like2JL | 1 | TPS9-like2JL-1F | TGTCGTCTCAAATCTTAGCAACC | SEQ ID NO: 1243 |
| TPS9-like2JL | 1 | TPS9-like2JL-1R | ATGCAAAAATCGGTCTCCCC | SEQ ID NO: 1244 |
| TPS9-like2JL | 2a | TPS9-like2JL-2aF | GCCAAGTTGAAGAATTGAAAGAAGTGG | SEQ ID NO: 1245 |
| TPS9-like2JL | 2a | TPS9-like2JL-2aR | ACTCTCAAAATGATAGGACAATCCC | SEQ ID NO: 1246 |
| TPS9-like2JL | 2b | TPS9-like2JL-2bF | AGAAGTGGTAAGAAAGGAGATATTTGG | SEQ ID NO: 1247 |
| TPS9-like2JL | 2b | TPS9-like2JL-2bR | AAGAAACCCTATATCCATGTTGTCG | SEQ ID NO: 1248 |
| TPS9-like2JL | 3a | TPS9-like2JL-3aF | GAATGTTTGGCGAGTGACACC | SEQ ID NO: 1249 |
| TPS9-like2JL | 3a | TPS9-like2JL-3aR | AAGGGCCTCTCTAGGGCTCG | SEQ ID NO: 1250 |
| TPS9-like2JL | 3b | TPS9-like2JL-3bF | AAGAACACCCCAATGATGATCC | SEQ ID NO: 1251 |
| TPS9-like2JL | 3b | TPS9-like2JL-3bR | ACTAAGCTCCTTTTTGTGCATGG | SEQ ID NO: 1252 |
| TPS9-like2JL | 4a | TPS9-like2JL-4aF | TGGTGGAAGGAATTAGACAGTGC | SEQ ID NO: 1253 |
| TPS9-like2JL | 4a | TPS9-like2JL-4aR | ATCAGCGATTGAGGAAAGTGC | SEQ ID NO: 1254 |
| TPS9-like2JL | 4b | TPS9-like2JL-4bF | TTATGAACCCCAATACTCTTTTGC | SEQ ID NO: 1255 |
| TPS9-like2JL | 4b | TPS9-like2JL-4bR | AGGAGCTTATGTTCTTCAAATATACC | SEQ ID NO: 1256 |
| TPS9-like2JL | 5 | TPS9-like2JL-5F | GGATAAACTCCATCCAGAATACTTGC | SEQ ID NO: 1257 |
| TPS9-like2JL | 5 | TPS9-like2JL-5R | TCTTGTTCAAATTCCTCAAAAGATTGC | SEQ ID NO: 1258 |
| TPS9-like2JL | 6a | TPS9-like2JL-6aF | GAAGCTCGATGGTTGAATGAAGG | SEQ ID NO: 1259 |
| TPS9-like2JL | 6a | TPS9-like2JL-6aR | CGCTTGCCCTAACAATCTTGG | SEQ ID NO: 1260 |
| TPS9-like2JL | 6b | TPS9-like2JL-6bF | TGATGGCTTGCTCTTTAGTTGG | SEQ ID NO: 1261 |
| TPS9-like2JL | 6b | TPS9-like2JL-6bR | AGCCACGTCATCCATGTACC | SEQ ID NO: 1262 |
| TPS9-like2JL | 7a | TPS9-like2JL-7aF | AGAATGAGCAAGAGAGAAATCATATACC | SEQ ID NO: 1263 |
| TPS9-like2JL | 7a | TPS9-like2JL-7aR | CCATGCAATAACCACTCGCC | SEQ ID NO: 1264 |
| TPS9-like2JL | 7b | TPS9-like2JL-7bF | TAGGCGAGTGGTTATTGCATGG | SEQ ID NO: 1265 |
| TPS9-like2JL | 7b | TPS9-like2JL-7bR | CCTAGCAAGATTCAGAGCACG | SEQ ID NO: 1266 |
| TPS9-likeJL | 1 | TPS9-likeJL-1F | AAAATGAGAAAATACATAAAATTGTTCGAC | SEQ ID NO: 1267 |
| TPS9-likeJL | 1 | TPS9-likeJL-1R | TCGATCTCCCCAAATAGATGGA | SEQ ID NO: 1268 |
| TPS9-likeJL | 2 | TPS9-likeJL-2F | TTGAAGAATTGAAAGAAGTAGTAAGAAAGG | SEQ ID NO: 1269 |
| TPS9-likeJL | 2 | TPS9-likeJL-2R | TCAAAATGATAGGACAATCCCAAACG | SEQ ID NO: 1270 |
| TPS9-likeJL | 3a | TPS9-likeJL-3aF | TGACAAGTTCAAAGATGAGAATGGC | SEQ ID NO: 1271 |
| TPS9-likeJL | 3a | TPS9-likeJL-3aR | TAGTAAATCTTCCCCGACGC | SEQ ID NO: 1272 |
| TPS9-likeJL | 3b | TPS9-likeJL-3bF | ACATTTGAGTTGCGTCGGGG | SEQ ID NO: 1273 |
| TPS9-likeJL | 3b | TPS9-likeJL-3bR | TAGCTTGGAGCCTGTTTAGGG | SEQ ID NO: 1274 |
| TPS9-likeJL | 3c | TPS9-likeJL-3cF | AAGAAAAACCCTAAACAGGCTCC | SEQ ID NO: 1275 |
| TPS9-likeJL | 3c | TPS9-likeJL-3cR | CTAAGCTCCTTTTTGTGCATGG | SEQ ID NO: 1276 |
| TPS9-likeJL | 4 | TPS9-likeJL-4F | AGAGACAGGAGTGTGGAACTATACC | SEQ ID NO: 1277 |
| TPS9-likeJL | 4 | TPS9-likeJL-4R | TGTCATCAGCTATTGTGGCAAAGG | SEQ ID NO: 1278 |
| TPS9-likeJL | 5 | TPS9-likeJL-5F | TGAAGAATTTGAGCAAGGGCTTA | SEQ ID NO: 1279 |
| TPS9-likeJL | 5 | TPS9-likeJL-5R | GCGTAATGAACTCTGTAAGTTTCT | SEQ ID NO: 1280 |
| TPS9-likeJL | 6 | TPS9-likeJL-6F | GTGGTTAAAGAAAGCTGAACGC | SEQ ID NO: 1281 |
| TPS9-likeJL | 6 | TPS9-likeJL-6R | GCCGACAAATAGTAGTGGATGC | SEQ ID NO: 1282 |
| TPS9-likeJL | 7 | TPS9-likeJL-7F | TGAATAGGCGAGTGGTTATTGC | SEQ ID NO: 1283 |
| TPS9-likeJL | 7 | TPS9-likeJL-7R | TGCAAGATTCAGGGCACG | SEQ ID NO: 1284 |

[0051] One or more of the polynucleotide primer pairs listed above in Table B, as well as additional polynucleotide primer pairs and/or groups of polynucleotide primer pairs as provided below, including B3/F3 polynucleotide primer pairs from the Tables depicting primers selected for LAMP assays (Tables 17-35), can be used to identify/select/breed plant cultivars of interest based on their energetic, anti-nociceptive and/or insecticidal terpene profiles. These polynucleotide primers/groups of polynucleotide primers, along with their expected terpene profiles (main product(s) and side product(s)), are set forth in Tables 1-16 below. Provided herein are plant cultivars identified and/or selected as expressing, or not expressing, at least one terpene synthase allele that is amplified, or a portion of which is amplified, using polynucleotide primer pairs (forward “F” and reverse “R” primers, or B3 and F3 LAMP primers, for HRM analysis), or is analyzed using sets of LAMP primers, for LAMP analysis. In aspects, the plant cultivars so selected have a terpene chemical phenotype that includes at least one of the main or side products generated by one or more of the terpene synthase profiles analyzed by amplification using primer pairs as depicted in Tables 1-15 (terpene chemical phenotype corresponding to each Table is provided immediately below the Table, i.e., the terpene chemical phenotype corresponding to each terpene synthase profile depicted in Tables 1-15 is set forth directly beneath each of Tables 1-15, respectively), and/or one or more of alpha-terpinene and gamma-terpinene, as identified, for example, by amplification using HRM primers and/or LAMP primer sets corresponding to primer group 6 or primer group 19. In aspects, the plant cultivars identified and/or so selected contain at least one of the main products of the terpene chemical phenotype corresponding to one or more of Tables 1-15, and/or one or more of alpha-terpinene and gamma-terpinene, as identified, for example, by amplification using HRM primers and/or LAMP primer sets corresponding to primer group 6 or primer group 19. In certain aspects, the plant cultivars identified and/or so selected contain a fraction of the products of the terpene chemical phenotype corresponding to one or more of Tables 1-15, and/or one or more of alpha-terpinene and gamma-terpinene, as identified, for example, by amplification using HRM primers and/or LAMP primer sets corresponding to primer group 6 or primer group 19. In aspects, the plant cultivars identified and/or so selected contain all of the products of the terpene chemical phenotype corresponding to one or more of Tables 1-15, and/or one or more of alpha-terpinene and gamma-terpinene, as identified, for example, by amplification using HRM primers and/or LAMP primer sets corresponding to primer group 6 or primer group 19.

[0052] The plant cultivars identified by any of the methods provided herein (e.g., using any of the primer pairs and/or primer sets as provided herein), and/or samples or extracts thereof, can be used for breeding methods as provided herein, for methods of treatment, e.g., by administering a sample containing one or more terpenes having an energetic profile, one or more terpenes having an anti-nociceptive profile, one or more terpenes having a sedative profile, or any combination thereof, or for methods of imparting insect resistance.

TABLE 1

Primer Group-Target : Primer Group 1 - *CsTPS2SK
Characterized Seq: **DQ839405.1
Assessment: Primers TPS2FN-1aF/R*** (SEQ ID NOs 385 (F) and 386 (R)), 1bF/R (SEQ ID NOs 387 (F) and 388 (R)), 3aF/R (SEQ ID NOs 391 (F) and 392 (R)), 3bF/R (SEQ ID NOs 394 (F) and 393 (R)), and 4aF/R (SEQ ID NOs 395 (F) and 396 (R)) are specific to DQ839405.1

| Primer Set | Gene | Gene Position Start | Amplicon Length |
|---|---|---|---|
| TPS2FN-1aF/R_amp_1 | TPS2 | 51 | 59 |
| TPS2FN-1aF/R_amp_2 | TPS2JL | 51 | 59 |
| TPS2FN-1bF/R_amp_1 | TPS2 | 47 | 51 |
| TPS2FN-1bF/R_amp_2 | TPS2JL | 47 | 51 |
| TPS2FN-3aF/R_amp_1 | TPS2 | 409 | 224 |
| TPS2FN-3aF/R_amp_2 | TPS2JL | 409 | 224 |
| TPS2FN-3bF/R_amp_1 | TPS2 | 475 | 246 |
| TPS2FN-3bF/R_amp_2 | TPS2JL | 475 | 246 |
| TPS2FN-4aF/R_amp_1 | TPS2 | 812 | 100 |
| TPS2FN-4aF/R_amp_2 | TPS2JL | 812 | 100 |

| | |
|---|---|
| Main Product(s) | Side Product(s) |
| (+)-α-pinene | (+)-β-pinene, myrcene, (-)-limonene, β-phellandrene and a monoterpene tentatively identified as isoterpinolene |

*Indicates names of terpene synthase (TPS) genes where mentioned in Tables 1-35 provided herein **Indicates Accession Nos. where mentioned in Tables 1-35 provided herein ***F or For indicates forward primer; R or Rev indicates reverse primer in the forward/reverse primer sets (F/R or For/Rev) listed in Tables 1-16 provided herein

TABLE 2

| | |
|---|---|
| Primer Group-Target : | Primer Group 2 - *CsTPS5FN |
| Characterized Seq: | **KY014560 |

Assessment: Primers TPS5FN-3F/R (SEQ ID NOs 973 (F) and 974 (R)) and 4F/R (SEQ ID NOs 975 (F) and 976 (R)) are specific to KY014560

| | | | |
|---|---|---|---|
| Primer Set | Gene | Gene Position Start | Amplicon Length |
| TPS5FN-3F/R_amp_1 | MSTRG.6589.1 | 653 | 151 |
| TPS5FN-3F/R_amp_2 | TPS5JL | 412 | 151 |
| TPS5FN-3F/R_amp_3 | Icl\|KY014560.1_cds_ARE72256.1_1 | 418 | 151 |
| TPS5FN-4F/R_amp_1 | MSTRG.6589.1 | 1158 | 109 |
| TPS5FN-4F/R_amp_2 | TPS5JL | 917 | 109 |
| TPS5FN-4F/R_amp_3 | Icl\|KY014560.1_cds_ARE72256.1_1 | 923 | 109 |

| | |
|---|---|
| Main Product(s) | Side Product(s) |
| Myrcene | (-)-a-pinene (24%), (-)-limonene (17%), (-)-β-pinene (15%), and sabinene (7%). |

TABLE 3

Primer Group-Target: Primer Group 3 - *CsTPS30PK
Characterized Seq: **KY624367
Assessment: Since TPS30-likeJL and TPS13-like1JL = TPS30PK/KY624367, specific Primers are TPS30-likeJL-6F/R (SEQ ID NOs 439 (F) and 440 (R)), 7F/R (SEQ ID NOs 441 (F) and 442 (R)), 8aF/R (SEQ ID NOs 443 (F) and 444 (R)), 8bF/R (SEQ ID NOs 445 (F) and 446 (R)) and TPS13-like1JL 1F/R (SEQ ID NOs 91 (F) and 92 (R)), 3F/R (SEQ ID NOs 95 (F) and 96 (R)), 6F/R (SEQ ID NOs 103 (F) and 104 (R)), and 7F/R (SEQ ID NOs 105 (F) and 106 (R)).

| Primer Set | Gene | Gene Position Start | Amplicon Length |
|---|---|---|---|
| TPS30-likeJL-6F/R_amp_1 | TPS30-like | 1184 | 134 |
| TPS30-likeJL-6F/R_amp_2 | TPS30-likeJL | 1184 | 134 |
| TPS30-likeJL-7F/R_amp_1 | TPS30-like | 1345 | 189 |
| TPS30-likeJL-7F/R_amp_2 | TPS30-likeJL | 1345 | 189 |
| TPS30-likeJL-8aF/R_amp_1 | TPS30-like | 1629 | 126 |
| TPS30-likeJL-8aF/R_amp_2 | TPS30-likeJL | 1629 | 126 |
| TPS30-likeJL-8bF/R_amp_1 | TPS30-like | 1726 | 158 |
| TPS30-likeJL-8bF/R_amp_2 | TPS30-likeJL | 1726 | 158 |
| TPS13-like1JL-1F/R_amp_1 | TPS13-like1JL | 150 | 136 |
| TPS13-like1JL-3F/R_amp_1 | TPS13-like1JL | 509 | 120 |
| TPS13-like1JL-6F/R_amp_1 | TPS13-like1JL | 1403 | 100 |
| TPS13-like1JL-6F/R_amp_2 | TPS30-like | 1457 | 100 |
| TPS13-like1JL-6F/R_amp_3 | TPS30-likeJL | 1457 | 100 |
| TPS13-like1JL-7F/R_amp_1 | TPS13-like1JL | 1573 | 261 |

| | |
|---|---|
| Main Product(s) | Side Product(s) |
| Myrcene | (-)-a-pinene (24%), (-)-limonene (17%), (-)-β-pinene (15%), and sabinene (7%), or (-)-a-pinene (23%), (-)-limonene (17%), sabinene (15%), and (-)-β-pinene (8%) |

TABLE 4

Primer Group-Target: Primer Group 4 - *CsTPS32PK
Characterized Seq: **MN967484
Assessment: Primers TPS5FN-3F/R (SEQ ID NOs 973 (F) and 974 (R)) and 4F/R (SEQ ID NOs 975 (F) and 976 (R)) and TPS5JL-3aF/R (SEQ ID NOs 991 (F) and 992 (R)), 3bF/R (SEQ ID NOs 993 (F) and 994 (R)), and 5F/R (SEQ ID NOs 997 (F) and 998 (R)) are specific to KY014560, but none specific to MN967484

| Primer Set | Gene | Gene Position Start | Amplicon Length |
|---|---|---|---|
| TPS5FN-3F/R_amp_1 | MSTRG.6589.1 | 653 | 151 |
| TPS5FN-3F/R_amp_2 | TPS5JL | 412 | 151 |
| TPS5FN-3F/R_amp_3 | Icl\|KY014560.1_cds_ARE72256.1_1 | 418 | 151 |
| TPS5FN-4F/R_amp_1 | MSTRG.6589.1 | 1158 | 109 |
| TPS5FN-4F/R_amp_2 | TPS5JL | 917 | 109 |
| TPS5FN-4F/R_amp_3 | Icl\|KY014560.1_cds_ARE72256.1_1 | 923 | 109 |
| TPS5JL-3aF/R_amp_1 | MSTRG.6589.1 | 673 | 240 |
| TPS5JL-3aF/R_amp_2 | TPS5JL | 432 | 240 |
| TPS5JL-3aF/R_amp_3 | Icl\|KY014560.1_cds_ARE72256.1_1 | 438 | 240 |
| TPS5JL-3bF/R_amp_1 | MSTRG.6589.1 | 679 | 107 |
| TPS5JL-3bF/R_amp_2 | TPS5JL | 438 | 107 |
| TPS5JL-3bF/R_amp_3 | Icl\|KY014560.1_cds_ARE72256.1_1 | 444 | 107 |
| TPS5JL-5F/R_amp_1 | MSTRG.6589.1 | 1285 | 78 |
| TPS5JL-5F/R_amp_2 | TPS5JL | 1044 | 78 |
| TPS5JL-5F/R_amp_3 | Icl\|KY014560.1_cds_ARE72256.1_1 | 1050 | 78 |

| | |
|---|---|
| Main Product(s) | Side Product(s) |
| Geraniol/Himachalane | himachalane (32%), bisabolol (31%), (E)-β-farnesene (14%), β-bisabolene (12%), α-bergamotene (10%), and nerolidol (2%). geraniol (23%), α-pinene (20%), myrcene (16%), limonene (13%), β-phellandrene (10%), terpinolene (5%), α-terpineol (13%), and camphene (1%) |

TABLE 5

Primer Group-Target : Primer Group 5 - *CsTPS31 PK
Characterized Seq: **MN967474
Assessment: Primers TPS11JL-1F/R (SEQ ID NOs 1 (F) and 2 (R)), 2bF/R (SEQ ID NOs 5 (F) and 6 (R)), 3aF/R (SEQ ID NOs 7 (F) and 8 (R)), 6F/R (SEQ ID NOs 15 (F) and 16 (R)) are specific to MN967474

| Primer Set | Gene | Gene Position Start | Amplicon Length |
|---|---|---|---|
| TPS11JL-1F/R_amp_1 | MSTRG.6585.1 | 30 | 57 |
| TPS11JL-1F/R_amp_2 | TPS11JL | 10 | 57 |
| TPS11JL-1F/R_amp_3 | IclIMN967474.1_cds_QLC36839.1_1 | 58 | 57 |
| TPS11JL-1F/R_amp_4 | Icl\|NC_044376.1_cds_XP_030508374.1_27714 | 40 | 57 |
| TPS11JL-2bF/R_amp_1 | MSTRG.6585.1 | 195 | 197 |
| TPS11JL-2bF/R_amp_2 | TPS11JL | 175 | 197 |
| TPS11JL-2bF/R_amp_3 | Icl\|MN967474.1_cds_QLC36839.1_1 | 223 | 197 |
| TPS11JL-3aF/R_amp_1 | MSTRG.6585.1 | 521 | 140 |
| TPS11JL-3aF/R_amp_2 | TPS11JL | 501 | 140 |
| TPS11JL-3aF/R_amp_3 | Icl\|MN967474.1_cds_QLC36839.1_1 | 549 | 140 |
| TPS11JL-6F/R_amp_1 | MSTRG.6585.1 | 1166 | 209 |
| TPS11JL-6F/R_amp_2 | TPS11JL | 1146 | 209 |
| TPS11JL-6F/R_amp_3 | Icl\|MN967474.1_cds_QLC36839.1_1 | 1194 | 209 |

| | |
|---|---|
| Main Product(s) | Side Product(s) |
| Terpinolene | α-terpineol (19%), linalool (14%), β-pinene (6%) and terpinen-4-ol (4%). 6% bulnesol, 2% bisabolol, and trace amounts of α-bergamotene and a cadinane type sesquiterpene with RI 1494.18 |

TABLE 6

Primer Group-Target: Primer Group 6 - CsTPS37FN and TPS37LPA5
Characterized Seq: MK614216
Assessment: Primers TPS37FN-2F/R (SEQ ID NOs 487 (F) and 488 (R)), 3F/R (SEQ ID NOs 489 (F) and 490 (R)), 4F/R (SEQ ID NOs 491 (F) and 492 (R)), 5F/R (SEQ ID NOs 493 (F) and 494 (R)), 7F/R (SEQ ID NOs 495 (F) and 496 (R)), 8aF/R (SEQ ID NOs 497 (F) and 498 (R)), and 8bF/R (SEQ ID NOs 499 (F) and 500 (R)) are specific to MK614216

| Primer Set | Gene | Gene Position Start | Amplicon Length |
|---|---|---|---|
| TPS37FN-2F/R_amp_1 | MK614216.1 | 177 | 100 |
| TPS37FN-2F/R_amp_2 | Icl\|MK614216.1_cds_QEM23725.1_1 | 177 | 100 |
| TPS37FN-3F/R_amp_1 | MK614216.1 | 334 | 215 |
| TPS37FN-3F/R_amp_2 | Icl\|MK614216.1_cds_QEM23725.1_1 | 334 | 215 |
| TPS37FN-4F/R_amp_1 | MK614216.1 | 648 | 194 |
| TPS37FN-4F/R_amp_2 | Icl\|MK614216.1_cds_QEM23725.1_1 | 648 | 194 |
| TPS37FN-5F/R_amp_1 | MK614216.1 | 963 | 204 |
| TPS37FN-5F/R_amp_2 | Icl\|MK614216.1_cds_QEM23725.1_1 | 963 | 204 |
| TPS37FN-7/RF_amp_1 | MK614216.1 | 1441 | 174 |
| TPS37FN-7F/R_amp_2 | Icl\|MK614216.1_cds_QEM23725.1_1 | 1441 | 174 |
| TPS37FN-8AF/2_amp_1 | MK614216.1 | 1630 | 229 |
| TPS37FN-8AF/R_amp_2 | Icl\|MK614216.1_cds_QEM23725.1_1 | 1630 | 229 |
| TPS37FN-8bF/R_amp_1 | MK614216.1 | 1733 | 129 |
| TPS37FN-8bF/R_amp_2 | Icl\|MK614216.1_cds_QEM23725.1_1 | 1733 | 129 |

| | |
|---|---|
| Main Product(s) | Side Product(s) |
| Terpinolene | 2.5% 3-Carene, 5.7% Alpha-phellandrene, 3.9% alpha-pinene, 2.7% alpha-terpineol, 3% Myrcene, 5.4% beta-pinene, 5.4% ocimene, 0.9% gamma-terpineol |

[0053] In Table 6, the gene designated as MK614216.1 is a terpinolene synthase (terpinolene being the main product) encoded by the nucleic acid sequence set forth in SEQ ID NO:1654 (see, e.g., FIG. 1) and having the peptide sequence set forth below:

MQCMAFHQFAPSSSLPIWSSINNRFTPKTSITSISKPKPKLKPKSNLKSRSRSSTCYPIQCTVVDNP
SSTITNNSDRRSANYGPPIWSFDFIQSLSTQYKGELYTSRLNKLEKDVKRILVGEENCLAQLELIDTI
QRLGLSYRFENEIISILKEKFTNNNNNPNYDLYATALQFRLLRQYGFEVPQEIFNNFKDQKTGEFKA
NISNDIMGALGLYEASFYGKKGESILDEARIFTTKCLKNYIEKNKLLDDDNNIIALFVNHALETPLHWR
INRLEARWFIEMYQKKKDMNFTLLEFAKLDFNMLQSIHQEDLKHLSRWWEQSKLGEKKMENYVRD
RLVEAFLWQIGVKFEPQFSQFRRISARLYVLITVIDDIYDVYGTLEELELFTKAIERWDVKAINELPEY
MRMPFFFLFNTVNEMGYDTLTDKNFINIEYLKKSWVVWSKYQLEEAKWFYSGYKPTLEEYMKNT
WISVGGPIILLHAYFAFTNPLEKASIKFLEEGYDDPSINIHEGSLEISNDGYPTIFHLGSILLRLEDDLG
TSSDEMKRGDVPKSIQCYMSDTGVSEDEAREHIKFLIMETWKEMNKEMDFNNYFSKEVVHVCKN
LGRTAKFIYLYGDGHASQNNLSKGHISDLIINPIPM (SEQ ID NO:1669)

[0054] A CsTPS37FN enzyme described in Livingston et al., The Plant Journal, 101:36-56 (2019), identifies the following terpene products produced by this enzyme: terpinolene (major product), α-Pinene, β-Pinene and limonene. The csTPS37FN from LPA5 cDNA, as described herein and as recited in Table 6 (CsTPS37LPA5 gene, used interchangeably herein with csTPS37LPA5 gene or TPS37LPA5 gene), on the other hand, was found to produce the following nine terpenes as identified by GC-MS (detection times indicated in parentheses): terpinolene (major product; 6.4 minutes), α-phellandrene (5.05 minutes), α-terpinene (5.25 minutes), α-pinene (4.65 minutes), β-pinene (4.7 minutes), β-myrcene (4.77 minutes), 3-carene (5.1 minutes), γ-Terpinene (5.88 minutes) and an unknown monoterpene (4.55 minutes). The sequence of the mRNA encoding the TPS37LPA5 mature peptide is shown below:

ACTGTGGTCGATAACCCTAGTTCTACGATTATTAATAATAGTGATCGAAGATCGGCCAAC
TATGGACCTCCCATTTGGTCTTTTGATTTCATTCAATCTCTTTCAACTCAATATAAGGGT
GAACTTTATACAAGTCGATTAAATAAGCTGGAGAAAGACGTGAAAAGGATACTGGTTGGA
GAGGAAAATTGTTTAGCTCAACTTGAGCTAATTGATACAATACAAAGACTTGGATTATCT
TATCGTTTTGAGAATGAAATCATTTCTATTTTGAAAGAAAAATTCACCAATAATAATAAC
AACCCTAATTATGATTTATATGCTACTGCTCTCAAATTTAGGCTTCTACGTCAATATGGA
TTTGAAGTATCTCAAGAAATTTTCAATAATTTCAAAGATCAGAAGACAGGAGAGTTCAAG
GCAAATATAAGTAATGATATTATGGGAGCATTAGGCTTATATGAAGCTTCATTCTATGGG
AAAAAGGGTGAAAGTATTTTGGATGAAGCAAGAATTTTCACAACAAAATGTCTCAAAAAT
TACATAGAGAAAAACAAATTATTAGATGATGATAATAATATTATTGCATTATTTGTTAAC
CATGCTTTGGAGACTCCACTTCATTGGAGAATAAATAGGTTGGAAGCTAGGTGGTTCATT
GAGATGTACCAGAAGAAACATGACATGAATTTCACATTACTTGAATTTGCCAAATTGGAT
TTTAACATGCTCCAATCAATACACCAAGAAGATCTAAAACATCTATCAAGATGGTGGGAG
CAATCTAAACTTGGAGAAAAGAAAATGGAAAATTATGTTAGAGATAGATTGGTGGAGGCT
TTTTTATGGCAGATTGGAGTAAAATTTGAGCCACAATTCAGTCAATTTAGAAGAATATCT
GCAAGATTATATGTTCTAATTACAGTAATTGATGACATATATGATGTGTATGGAACATTG
GAGGAATTAGAGCTTTTCACAAAAGCTATTGAAAGATGGGATGTGAAAGCCATAAATGAG
TTACCAGAATATATGAGAATGCCTTTCTTTTTCTTATTCAATACTGTGAATGAAATGGGG
TATGATACCTTAGCAGACAAAAATTTCATCAACATTGAATACCTCAAGAAATCGTGGGTG
GTTTGGTCTAAATATCAATTAGAAGAGGCAAAATGGTTCTATAGTGGATACAAACCAACA
TTAGAAGAATATATGAAGAATACATGGATTTCAGTTGGGGGACCAATTATTCTTTTGCAT
GCTTATTTTGCTTTCACAAATCCCTTAGAAAAAGCTTCCATAAAATTCTTGGAAGAAGGT
TATGATGATCCTTCCATAAATATTCATGAAGGATCCCTGGAAATATCAAATGATGGTTAC
CCTACCATATTTCATCTTGGATCCATACTTTTACGACTTGAAGATGACCTAGGAACATCG
TCGGATGAGATGAAAAGAGGAGATGTTCCGAAATCAATTCAATGTTACATGAACGATACA
GGTGTTTCTGAAGATGAAGCTCGCGAGCACATCAAATTTTTGATAATGGAAACATGGAAA
GAGATGAATAAAGAAATGGACTTCAATAATTATTTCTCGAAAGAAGTTGTTCATGTTTGC
AAAAATCTTGGTAGAACAGCCAAATTTATATACCTTTATGGTGATGGACATGCTTCTCAG
AATAATTTATCAAAGGGACATATTTCAGATTTGATTATTAACCCTATTCCCATGTAA (SEQ ID
NO:1670).

[0055] The mature peptide encoded by the TPS37LPA5 gene has the sequence shown below:

TVVDNPSSTIINNSDRRSANYGPPIWSFDFlQSLSTQYKGELYTSRLNKLEKDVKRILVG
EENCLAQLELIDTIQRLGLSYRFENEIISILKEKFTNNNNNPNYDLYATALKFRLLRQYG
FEVSQEIFNNFKDQKTGEFKANISNDIMGALGLYEASFYGKKGESILDEARIFTTKCLKN
YIEKNKLLDDDNNIIALFVNHALETPLHWRINRLEARWFIEMYQKKHDMNFTLLEFAKLD
FNMLQSIHQEDLKHLSRWWEQSKLGEKKMENYVRDRLVEAFLWQIGVKFEPQFSQFRRIS
ARLYVLITVIDDIYDVYGTLEELELFTKAIERWDVKAINELPEYMRMPFFFLFNTVNEMG
YDTLADKNFINIEYLKKSWVVWSKYQLEEAKWFYSGYKPTLEEYMKNTWISVGGPIILLH
AYFAFTNPLEKASIKFLEEGYDDPSINIHEGSLEISNDGYPTIFHLGSILLRLEDDLGTS
SDEMKRGDVPKSIQCYMNDTGVSEDEAREHIKFLIMETWKEMNKEMDFNNYFSKEVVHVC
KNLGRTAKFIYLYGDGHASQNNLSKGHISDLIINPIPM* (SEQ ID NO: 1671).

[0056] Thus, provided herein is a terpene synthase gene that facilitates the synthesis of terpinolene and at least two other terpenes selected from among α-phellandrene, α-teminene, 3-carene and γ-Terpinene. In certain aspects, the terpene synthase gene facilitates the synthesis of 3-carene and γ-Terpinene. In aspects, the terpene synthase gene facilitates the synthesis of α-phellandrene, 3-carene and γ-Terpinene.

TABLE 7

Primer Group-Target: Primer Group 7 - CsTPS1 8Choc Characterized Seq: MN967473/MK801763/MK801764
Assessment: Primers TPS18VF-2F/R (SEQ ID NOs 257 (F) and 258 (R)), 5F/R (SEQ ID NOs 265 (F) and 266 (R)), and TPS19BL-3F/R (SEQ ID NOs 281 (F) and 282 (R)), 5aF/R (SEQ ID NOs 285 (F) and 286 (R)), and TPS62JL-4F/R (SEQ ID NOs 1043 (F) and 1044 (R)) are best specific to MN967473/MK801763/MK801764, but really most of this panel would likely pick up the linalool/neriodiol subclade

| Primer Set | Gene | Gene Position Start | Amplicon Length |
|---|---|---|---|
| TPS18VF-2F/R_amp_1 | Icl\|MK801764.1_cds_QCY41292.1_1 | 180 | 218 |
| TPS18VF-5F/R_amp_1 | Icl\|MK801764.1_cds_QCY41292.1_1 | 1014 | 111 |
| TPS18VF-5F/R_amp_2 | Icl\|MN967473.1_cds_QLC36838.1_1 | 1014 | 111 |
| TPS19BL-3F/R_amp_1 | Icl\|MK801763.1_cds_QCY41291.1_1 | 480 | 216 |
| TPS19BL-3F/R_amp_2 | Icl\|MK801764.1_cds_QCY41292.1_1 | 480 | 216 |
| TPS19BL-3F/R_amp_3 | Icl\|NC_044371.1_cds_XP_030491262.1_4287 | 273 | 216 |
| TPS19BL-5aF/R_amp_1 | MSTRG.5536.5 | 1229 | 97 |
| TPS19BL-5aF/R_amp_2 | TPS62JL | 873 | 97 |
| TPS19BL-5aF/R_amp_3 | Icl\|MK801763.1_cds_QCY41291.1_1 | 1020 | 97 |
| TPS62JL-4F/R_amp_1 | MSTRG.5536.5 | 1226 | 106 |
| TPS62JL-4F/R_amp_2 | TPS62JL | 870 | 106 |
| TPS62JL-4F/R_amp_3 | Icl\|MK801763.1_cds_QCY41291.1_1 | 1017 | 106 |

| | |
|---|---|
| Main Product(s) | Side Product(s) |
| (R)-Linalool | |

TABLE 8

| Primer Group-Target : | Primer Group 8 - CsTPS5PK |
|---|---|
| Characterized Seq: | MN967481 |

Redundant from Primer Group 2, Primers TPS5FN-3F/R (SEQ ID NOs 973 (F) and 974 (R)) and 4F/R (SEQ ID NOs 975 (F) and 976 (R))
CsTPS5(PK) has 96% amino acid identity to CsTPS5(FN) (Primer Group 2) and these primers amplify both terpene synthases

| | |
|---|---|
| Main Product(s) | Side Product(s) |
| α-pinene (33%) (GPP as substrate) α-bisabolol (46%) (FPP assubstrate) | myrcene (18%), α-terpineol (18%), limonene (17%), and β-pinene (14%) (GPP as substrate) himachalane (27%), (E)-β-farnesene (11%), α-bergamotene (7%), and a compound tentatively identified as a cyclounitriene (9%) (FPP as substrate). |

TABLE 9

Primer Group-Target : Primer Group 9 - CsTPS18VF/R
Characterized Seq: MK801764
Assessment: Redundant from Primer Group 7, Primers TPS18VF-2F/R (SEQ ID NOs 257 (F) and 258 (R)) and 5F/R (SEQ ID NOs 265 (F) and 266 (R)), and TPS19BL-3F/R (SEQ ID NOs 281 (F) and 282 (R)), 5aF/R (SEQ ID NOs 285 (F) and 286 (R)), and TPS62JL-4F/R (SEQ ID NOs 1043 (F) and 1044 (R)) are best specific to MN967473/MK801763/MK801764, but TPS18VF-2F/R (SEQ ID NOs 257 (F) and 258 (R)) would pick up the specific MK801764 from the linalool/neriodiol subclade

| Primer Set | Gene | Gene Position Start | Amplicon Length |
|---|---|---|---|
| TPS18VF-2F/R_amp_1 | Icl\|MK801764.1_cds_QCY41292.1_1 | 180 | 218 |

| | |
|---|---|
| Main Product(s) | Side Product(s) |
| Linalool | |

TABLE 10

Primer Group-Target : Primer Group 10 - CsTPS19BL
Characterized Seq: MK801763
Assessment: Redundant from Primer Group 7, Primers TPS18VF-2F/R (SEQ ID NOs 257 (F) and 258 (R)) and 5F/R (SEQ ID NOs 265 (F) and 266 (R)), and TPS19BL-3F/R (SEQ ID NOs 281 (F) and 282 (R)), 5aF/R (SEQ ID NOs 285 (F) and 286 (R)), and TPS62JL-4F/R (SEQ ID NOs 1043 (F) and 1044 (R)) are best specific to MN967473/MK801763/MK801763, but TPS19BL-5aF/R (SEQ ID NOs 285 (F) and 286 (R)) and TPS62JL-4F/R (SEQ ID NOs 1043 (F) and 1044 (R)) would pick up the specific MK801763 from the linalool/neriodiol subclade

| Primer Set | Gene | Gene Position Start | Amplicon Length |
|---|---|---|---|
| TPS19BL-5aF/R_amp_1 | MSTRG.5536.5 | 1229 | 97 |
| TPS19BL-5aF/R_amp_2 | TPS62JL | 873 | 97 |
| TPS19BL-5aF/R_amp_3 | Icl\|MK801763.1_cds_QCY41291.1_1 | 1020 | 97 |
| TPS62JL-4F/R_amp_1 | MSTRG.5536.5 | 1226 | 106 |
| TPS62JL-4F/R_amp_2 | TPS62JL | 870 | 106 |
| TPS62JL-4F/R_amp_3 | Icl\|MK801763.1_cds_Q CY41291.1_1 | 1017 | 106 |

| | |
|---|---|
| Main Product(s) | Side Product(s) |
| Linalool/Nerolidol | |

TABLE 11

| Primer Group-Target : | Primer Group 11 - CsTPS35LS | | |
|---|---|---|---|
| Characterized Seq: | MN967475 | | |
| Assessment: Primers TPS63JL-2aF/R (SEQ ID NOs 1053 (F) and 1054 (R)), 2bF/R (SEQ ID NOs 1055 (F) and 1056 (R)), and TPS63JL-6bF/R (SEQ ID NOs 1067 (F) and 1068 (R)) are specific to MN967475 | | | |
| Primer Set | Gene | Gene Position Start | Amplicon Length |
| TPS63JL-2aF/R_amp_1 | MSTRG.5531.1 | 560 | 242 |
| TPS63JL-2aF/R_amp_2 | TPS63JL | 269 | 242 |
| TPS63JL-2aF/R_amp_3 | IcIMN967475.1_cds_QLC36840.1_1 | 416 | 242 |
| TPS63JL-2bF/R_amp_1 | MSTRG.5531.1 | 788 | 121 |
| TPS63JL-2bF/R_amp_2 | TPS63JL | 497 | 121 |
| TPS63JL-2bF/R_amp_3 | Icl\|MN967475.1_cds_QLC36840.1_1 | 644 | 121 |
| TPS63JL-6bF/R_amp_1 | MSTRG.5531.1 | 1591 | 171 |
| TPS63JL-6bF/R_amp_2 | TPS63JL | 1300 | 171 |

| | |
|---|---|
| Main Product(s) | Side Product(s) |
| Linalool/Nerolidol | citronellol (5%) and myrcene (2%) |

TABLE 12

Primer Group-Target : Primer Group 15 - CsTPS25LS
Characterized Seq: MN967472
Assessment: Primers TPS14JL-1F/R (SEQ ID NOs 163 (F) and 164 (R)), 4F/R (SEQ ID NOs 169 (F) and 170 (R)), and 6F/R (SEQ ID NOs 171 (F) and 172 (R)) are specific to MN967472

| Primer Set | Gene | Gene Position Start | Amplicon Length |
|---|---|---|---|
| TPS14JL-1F/R_amp_1 | MN967472.1 | 8 | 86 |
| TPS14JL-1F/R_amp_2 | MSTRG.12576.1 | 420 | 86 |
| TPS14JL-1F/R_amp_3 | TPS14JL | 8 | 86 |
| TPS14JL-1F/R_amp_4 | IcI\|MN967472.1_cds_QLC36837.1_1 | 8 | 86 |
| TPS14JL-1F/R_amp_5 | IcI\|MN967477.1_cds_QLC36842.1_1 | 8 | 86 |
| TPS14JL-4F/R_amp_1 | MSTRG.12576.1 | 1169 | 149 |
| TPS14JL-4F/R_amp_2 | TPS14JL | 757 | 149 |
| TPS14JL-6F/R_amp_1 | MSTRG.12576.1 | 1558 | 189 |
| TPS14JL-6F/R_amp_2 | TPS14JL | 1146 | 189 |

| | |
|---|---|
| Main Product(s) | Side Product(s) |
| (E)-β-farnesene | cadinane type compound (22%) with RI 1494.76, (Z, E)-α-famesene (15%), and nerolidol (7%) |

TABLE 13

Primer Group 16 includes polynucleotide primer pairs for selection of terpene synthases (e.g., TPS20_LPA5, used synonymously with TPS20_LPA005) producing the contact insecticide guaiol (QTL - quantitative trait loci), e.g., using HRM to detect the presence or absence (PAV) of a terpene synthase

| | Sequenc e (5′->3′) | Template strand | Length | Start | Stop | Tm | GC% | Self complem entarity | Self 3′ complem entarity |
|---|---|---|---|---|---|---|---|---|---|
| Forward primer | TGTTTA GAGTTT GCTGTT AGGCA (SEQ ID NO: 1401) | Plus | 23 | 76790560 | 76790582 | 58.54 | 39.13 | 3.00 | 1.00 |
| Reverse primer | GGTGAG ACCGCC GTATAT CTT (SEQ ID NO: 1402) | Minus | 21 | 76790661 | 76790641 | 59.39 | 52.38 | 4.00 | 0.00 |
| Product length | 102 | | | | | | | | |

Primer Group 16 - TPS20-LPA004/LPA005- HRM Discrimination Set that discriminates between the LPA004 and LPA005 alleles - Reverse primer is single loci specific to TPS20

| | | | | | | | | | |
|---|---|---|---|---|---|---|---|---|---|
| Sequenc e(5′->3′) | Sequenc e (5′->3′ | Template strand | Length | Start | Stop | Tm | GC% | Self complem entarity | Self 3′ complem entarity |
| Forward primer | TGAGGC TTCGCA CTTGAG TT (SEQ ID NO: 1403) | Plus | 20 | 459 | 478 | 59.89 | 50.00 | 4.00 | 2.00 |
| Reverse primer | GGCCTA TGCAAG GCTATG GA (SEQ ID NO: 1404) | Minus | 20 | 599 | 580 | 59.60 | 55.00 | 8.00 | 3.00 |
| Product length | | | | | | | | | |

Primer Group 16 - TPS20LPA005 --Specific PAV set - will only amplify TPS20LPA5 - Reverse primer Specific by 1 SNP

| Sequence (5′->3′) | Template strand | Length | Start | Stop | Tm | GC% | Self complem entarity | Selt 3′ complem entarity | |
|---|---|---|---|---|---|---|---|---|---|
| Forward primer | GAAGCA CTTGCT TTCACA AA (SEQ ID NO: 1405) | Plus | 20 | 502 | 521 | 55.31 | 40.00 | 8.00 | 3.00 |
| Reverse primer | GGCCTA TGCAAG GCTATG G (SEQ ID NO: 1406) | Minus | 19 | 599 | 581 | 58.05 | 57.89 | 8.00 | 2.00 |
| Product length | 98 | | | | | | | | |

[0057] The TPS20LPA4 (non-guaiol synthase) and TPS20LPA5 (guaiol synthase) alleles share 99.46% nucleotide similarity and 98.91 % amino acid similarity. This represents 6 amino acid changes between the LPA004 and LPA005 versions of TPS20. The mRNA coding sequences for each are shown below:

### TPS20 Sequences For LPA005 and LPA004

[0058] TPS20LPA4_mRNA:1-1656

ATGTCAAATATTCAAGTCTTAGCTTCATCTCAATTAAGTGACAAAATTGTTGCTCGYCCA
ACAACAAAATTTCACCCTTCTATTTGGGGCGATCGATTCCTCCATTACAATATTTCAGAA
CAAGACTTGGTTTGCAAACAAGAAARAATTGAAGAATTAATACAAGTTGTAAAGAAAGAG
ATATTATCTTCAAATCATGATCAATTGAAGTTGATTGACAATCTCCAACGTTTGGGATTA
TCATATCATTTTGAGAGTGAAATTGAGAAATTGTTGGAACAATTAAGTACCACTCATCAT
CAAAATCATCAAGATCTACATGATGCTTCTCTTTGGTTTAGATTATTAAGACAACATGGA
TTTAATGTTTCATCAAGTATATTTGAAAAATTCAAAGACGAGGAAGGTAACTTTAAAGAA
AGCCTAATAACYGATGTTCCAGGTTTGCTTAGCTTGTATGAGGCTTCGCACTTGAGTTAT
GTTGGAGAAAGCATACTAGATGAAGCACTTGCTTTCACAACCACTCACCTTAAGGCTATT
GTGGCAAATAGTAAAGATCATCCATTATCACATCAAATATCCATAGCCTTGCATAGGCCT
CTAAGAAAGACCATAGAGAGGCTTCATGCTAGGTTTTACATCTCAATCTATGAAAAGGAT
GCCTCTCATAACAAACTATTGCTAGAGCTTGCAAAGTTAGACTTCAATCTACTTCAATGT
TTCCACAAAAAGGAACTTAGTGAAATTACGAGGTGGTGGAAGGAGCATGAGTTTGCAAAG
AAATTCCCTTTTGCAAGAGATAGGATGGTGGAACTGTATTTTTGGATATTGGGTGTATAT
TATGAACCCAAATACTCTCGAGCAAGGAAGCTTTTAACCAAAGTCATTGCATTGACCTCA
ATCACTGATGATATTTATGATGCATATGGTACTATTGATGAGCTTCAGCTTCTTACCAAA
GCAATTCAAAGGTGGGACATAAATTGTATGGATAAACTTAAGCAAGAATATTTAAAGACA
TATTATAAGGTAATGTTGGATTCTTATGAAGAATTTGAAAAGGAGCTTAAAAAGGAAGAA
TTATACAAACTTGAGTATGCAAAAGAAGAGATGAAAAGAATTATTGGAGGTTATTTTGAA
GAAGCTCGATGGTTGAATGAAGGATATTTCCCAAGCTTCGATGAGCATTTGAGAGTCTCT
TATGTTTCTTCTGGTAACGTTTTGTTGATAGCCACAAGTTTTGTAGGGATGCATGATGTT
GTAACACATGAAACTCTAGATTGGCTCTCCAAAGACCCTAAAATTGTTTCAGCTTCCACT
CTCCTTKCTAGGTTCATGGATGATATTGGTTCTCGCAAGTTTGAGCAAAAGAGAAATCAC
ATACCATCTACAGTGGATTGTTACATGAAACAATATGGGGTATCAGAGGAAGAGGCAATT
AAAGAACTTAATAAAAGAGTGGACACCCACTGGAAAGAAATTAATGAAGACTTTATTAGG
CCAGCAGTTGTGCCCTTTCCTATCTTAGTTCGTGTTCTTAATTTTACAAAAATAGTAGAT
CTTCTTTACAAAGAGGGCGATGATCAATACACAAATGTTGGAAAAGTGCTCAAAGAAAGC
ATTGCTGCTTTGCTTATAGATTCAATCCCATTATAA (SEQ ID NO: 1407)

[0059] TPS20_LPA5_mRNA:1-1656

ATGTCAAATATTCAAGTCTTAGCTTCATCTCAATTAAGTGACAAAATTATTGCTCGTCCA
ACAACAAAATTTCACCCTTCTATTTGGGGTGATCGATTCCTCCATTACAATATTTCAGAA
CAAGACTTGGTTTGCAAACAAGAAAAAGTTGAAGAATTAATACAAGTTGTAAAGAAAGAG
ATATTATCTTCAAATCATGATCAATTGAAGTTGATTGACAATCTCCAACGTTTGGGATTA
TCATATCATTTTGAGAGTGAAATTGAGAAATTGTTGGAACAATTAAGTACCACTCATCAT
CAAAATCATCAAGATCTACATGATGCTTCTCTTTGGTTTAGATTATTAAGACAACATGGA
TTTAATGTTTCATCAAGTATATTTGAAAAATTCAAAGACGAGGAAGGTAACTTTAAAGAA
AGCCTAATAACYGATGTTCCAGGTTTGCTTAGCTTGTATGAGGCTTCGCACTTGAGTTAT
GTTGGAGAAAGCATACTAGATGAAGCACTTGCTTTCACAAACACTCACCTTAAGGCTATT
GTGGCAAATAGTAAAGATCATCCATTATCACATCAAATATCCATAGCCTTGCATAGGCCT
CTAAGAAAGACCATAGAGAGGCTTCATGCTAGGTTTTACATCTCAATCTATGAAAAGGAT
GCCTCTCATAACAAACTATTGCTAGAGCTTGCAAAGTTAGACTTCAATCTACTTCAATGT
TTCCACAAAAAGGAACTTAGTGAAATTACGAGGTGGTGGAAGGAGCATGAGTTTGCAAAG
AAATTCCCTTTTGCAAGAGATAGGATGGTGGAACTGTATTTTTGGATATTGGGTGTATAT
TATGAACCCAAATACTCTCGAGCAAGGAAGCTTTTAACCAAAGTCATTGCATTGACCTCA
ATCACTGATGATATTTATGATGCATATGGTACTATTGATGAGCTTCAGCTTCTTACCAAA
GCAATTCAAAGGTGGGACATAAATTGTATGGATAAACTTAAGCAAGAATATTTAAAGACA
TATTATAAGGTAATGTTGGATTCTTATGAAGAATTTGAAAAGGAGCTTAAAAAGGAAGAA
TTATACAAACTTGAGTATGCAAAAGAAGAGATGAAAAGAATTATTGGAGGTTATTTTGAA
GAAGCTCGATGGTTGAATGAAGGATATTTCCCAAGCTTCGATGAGCATTTGAGAGTCTCT
TATGTTTCTTCTGGTAACGTTTTGTTGATAGCCACAAGTTTTGTAGGGATGCATGATGTT
GTAACACATGAAACTCTAGATTGGCTCTCGAAAGACCCTAAAATTGTTTCAGCTTCTACT
CTCCTTTCTAGGTTCATGGATGATATTGGTTCTCGCAAGTTTGAGCAAAAGAGAAATCAC
ATACCATCTACAGTGGATTGTTACATGAAACAATATGGGGTATCAGAGGAAGAGGCAATT
AAAGAACTTAATAAAAGAGTGGACACCCACTGGAAAGAAATTAATGAAGACTTTATTAGG
CCAGCAGTTGTGCCCTTTCCTATCTTAGTTCGTGTTCTTAATTTTACAAAAATAGTAGAT
CTTCTTTACAAAGAGGGCGATGATCAATACACAAATGTTGGAAAAGTGCTCAAAGAAAGC
ATTGCTGCTTTGCTTATAGATTCAATCCCATTATAA (SEQ ID NO: 1408)

[0060] Despite the close similarity in sequences, the terpene product profiles produced by each of these alleles are different, as shown in FIG. 2 (FPP = farnesyl pyrophosphate as precursor; GPP =geranyl pyrophosphate as precursor). Only one allele, TPS20_LPA5 (LPA005) produces the insecticidal terpene, guaiol. The methods provided herein permit specific identification/detection of the guaiol producing allele in a plant, thereby permitting selection of a plant cultivar having a desired insecticidal profile. It may be possible, in embodiments, to modify a plant cultivar containing the LPA004 allele using genetic engineering, e.g., by swapping exons 1, 2, 3, and 6 of the LPA004 allele with the LPA005 versions of these exons to, e.g., produce guaiol, menthol, isoborneol, borneol, alpha-humulene, and alpha-cedrene instead of valencene, germacrene-B and farnescene.

TABLE 14

Primer Group-Target: Primer Group 17 - CsTPS29BC
Characterized Seq:MN967468
Assessment: Primers TPS43JL-1 F/R (SEQ ID NOs 631 (F) and 632 (R)), 2aF/R (SEQ ID NOs 633 (F) and 634 (R)), 2bF/R (SEQ ID NOs 635 (F) and 636 (R)), 3F/R (SEQ ID NOs 637 (F) and 638 (R)), and 4F/R (SEQ ID NOs 639 (F) and 640 (R)) are specific to MN967468

| Primer Set | Gene | Gene Position Start | Amplicon Length |
|---|---|---|---|
| TPS43JL-1F/R_amp_1 | TPS43JL | 28 | 204 |
| TPS43JL-1F/R_amp_2 | XM_030628902.1 | 265 | 204 |
| TPS43JL-1F/R_amp_3 | IcI\|MN967468.1_cds_QLC36833.1_1 | 265 | 204 |
| TPS43JL-1F/R_amp_4 | IcI\|NC_044379.1_cds_XP_030484762.1 25100 | 265 | 204 |
| TPS43JL-2aF/R_amp_1 | TPS43JL | 245 | 136 |
| TPS43JL-2aF/R_amp_2 | XM_030628902.1 | 482 | 136 |
| TPS43JL-2aF/R_amp_3 | IcI\|MN967468.1_cds_QLC36833.1_1 | 482 | 136 |
| TPS43JL-2aF/R_amp_4 | IcI\|NC_044379.1_cds_XP_030484762.1_25100 | 482 | 136 |
| TPS43JL-2bF/R_amp_1 | TPS43JL | 321 | 244 |
| TPS43JL-3F/R_amp_1 | TPS43JL | 654 | 174 |
| TPS43JL-3F/R_amp_2 | XM_030628902.1 | 891 | 174 |
| TPS43JL-3F/R_amp_3 | IcI\|MN967468.1_cds_QLC36833.1_1 | 891 | 174 |
| TPS43JL-3F/R_amp_4 | IcI\|NC_044379.1_cds_XP_030484762.1_25100 | 891 | 174 |
| TPS43JL-4F/R_amp_1 | TPS43JL | 835 | 88 |
| TPS43JL-4F/R_amp_2 | XM_030628902.1 | 1072 | 88 |
| TPS43JL-4F/R_amp_3 | IcI\|MN967468.1_cds_QLC36833.1_1 | 1072 | 88 |
| TPS43JL-4F/R_amp_4 | IcI\|NC_044379.1_cds_XP_030484762.1_25100 | 1072 | 88 |
| TPS43JL-5F/R_amp_1 | TPS43JL | 1072 | 159 |
| TPS43JL-5F/R_amp_2 | XM_030628902.1 | 1309 | 159 |
| TPS43JL-5F/R_amp_3 | IcI\|MN967468.1_cds_QLC36833.1 1 | 1309 | 159 |
| TPS43JL-5F/R_amp_4 | IcI\|NC_044379.1_cds_XP_030484762.1_25100 | 1309 | 159 |
| TPS43JL-6F/R_amp_1 | TPS43JL | 1264 | 145 |

| | |
|---|---|
| Main Priduct(s) | Side Product(s) |
| Linalool/Nerolidol | |

TABLE 15

Primer Group-Target: Primer Group 18 - CsTPS1 7AK
Characterized Seq: MN967470
Assessment: Primers TPS51JL-1F/R (SEQ ID NOs 827 (F) and 828 (R)), 2F/R (SEQ ID NOs 829 (F) and 830 (R)), 3aF/R (SEQ ID NOs 831 (F) and 832 (R)), and 3bF/R (SEQ ID NOs 833 (F) and 834 (R)) are specific to MN967470

| Primer Set | Gene | Gene Position Start | Amplicon Length |
|---|---|---|---|
| TPS51JL-1F/R_amp_1 | MSTRG.26703.2 | 91 | 50 |
| TPS51JL-1F/R_amp_2 | TPS51JL | 33 | 50 |
| TPS51JL-1F/R_amp_3 | IcI\|MN967470.1_cds_QLC36835.1_1 | 63 | 50 |
| TPS51JL-2F/R_amp_1 | MSTRG.26703.2 | 188 | 202 |
| TPS51JL-2F/R_amp_2 | TPS51JL | 130 | 202 |
| TPS51JL-2F/R_amp_3 | IcI\|MN967470.1_cds_QLC36835.1_1 | 160 | 202 |
| TPS51JL-2F/R_amp_4 | IcI\|NW_022060378.1_cds_XP 030485348.1_33426 | 160 | 202 |
| TPS51JL-2F/R_amp_5 | IcI\|NW_022060378.1_cds_XP_030485349.1_33424 | 160 | 202 |
| TPS51JL-2F/R_amp_6 | IcI\|NW_022060378.1_cds_XP_030485350.1_33425 | 160 | 202 |
| TPS51JL-3aF/R_amp_1 | MSTRG.26703.2 | 450 | 104 |
| TPS51JL-3aF/R_amp_2 | TPS51JL | 392 | 104 |
| TPS51JL-3aF/R_amp_3 | IcI\|MN967470.1_cds_QLC36835.1_1 | 422 | 104 |
| TPS51JL-3aF/R_amp_4 | IcI\|NW_022060378.1_cds_XP_030485348.1_33426 | 425 | 104 |
| TPS51JL-3aF/R_amp_5 | IcI\|NW_022060378.1_cds_XP_030485349.1_33424 | 422 | 104 |
| TPS51JL-3aF/R_amp_6 | IcI\|NW_022060378.1_cds_XP_030485350.1_33425 | 425 | 104 |
| TPS51JL-3bF/R_amp_1 | MSTRG.26703.2 | 529 | 184 |
| TPS51JL-3bF/R_amp_2 | TPS51JL | 471 | 184 |
| TPS51JL-3bF/R_amp_3 | IcI\|MN967470.1_cds_QLC36835.1_1 | 501 | 184 |
| TPS51JL-3bF/R_amp_4 | IcI\|NW_022060378.1_cds XP_030485348.1_33426 | 504 | 184 |
| TPS51JL-3bF/R_amp_5 | IcI\|NW_022060378.1_cds XP_030485349.1_33424 | 501 | 184 |
| TPS51JL-3bF/R_amp_6 | IcI\|NW_022060378.1_cds XP_030485350.1_33425 | 504 | 184 |
| TPS51JL-5F/R_amp_1 | MSTRG.26703.2 | 1053 | 124 |
| TPS51JL-5F/R_amp_2 | TPS51JL | 995 | 124 |
| TPS51JL-6aF/R_amp_1 | MSTRG.26703.2 | 1220 | 100 |
| TPS51JL-6aF/R_amp_2 | TPS51JL | 1162 | 100 |

| | |
|---|---|
| Main Product(s) | Side Product(s) |
| Myrcene & Linalool | geraniol (16%), (E)-β-ocimene (8%) and α-terpineol (9%) |

TABLE 16

Primer Group 19: TPS33PK (KY624371) - PAV/HRM Primers - gDNA/cDNA HRM/PAV Primer Set

| | Sequence (5′->3′) | Temple te strand | Length | Start | Stop | Tm | GC% | Self complem entarity | Self 3′ complem entarity |
|---|---|---|---|---|---|---|---|---|---|
| Forward primer | TGGATTTCAGT AGGAGCACCA (SEQ ID NO: 1409) | Plus | 21 | 92 | 112 | 58.73 | 47.62 | 4.00 | 2.00 |
| Reverse primer | ATTCCAAGCAT TCGAAAATCTC TT (SEQ ID NO: 1410) | Minus | 24 | 197 | 174 | 57.48 | 33.33 | 6.00 | 2.00 |
| Product length | 106 | | | | | | | | |

[0061] Tables 17-35 provide sets of primers for identifying/selecting plant cultivars having desired energetic, anti-nociceptive and/or insecticidal profiles by LAMP assay. The B3 and F3 primers of the LAMP assay also can be used as polynucleotide primer pairs, e.g., in PCR, qPCR or HRM assays to detect the presence of a desired terpene synthase gene or allele.

[0062] LAMP primers designated as “common” amplify a gene rather than a particular characterized allele. For example, “Primer Group 5: TPS31 PK-common exon 3 LAMP primers” can amplify TPS31Cs10, TPS31 PK, and other very similar TPS31 alleles, whereas “Primer Group 5: TPS31 PK-specific exon 3 LAMP primers” only amplifies the PK-type allele of TPS31 (denoted as specific or unique). The goal of this is to cover both possibilities of (1) whether all TPS31 genes made the same product and selecting for any allele of TPS31 would allow you to select for a cultivars producing a desired terpene or set of terpenes (e.g., terpinolene in this case), or (2) if only the PK-type allele of TPS31 (allele that’s been functionally characterized) makes terpinolene and then other alleles, like TPS31Cs10, make different product profiles. The FIP and BIP primers can, in embodiments, include a poly T linker linking the F2 and F1c primers (FIP) and/or the B2 and B1c primers (BIP) (i.e., the hyphens shown in FIP and BIP can be a poly T linker or can directly connect the two primers). The length of the poly T linker, when present, can be from about 3 Ts to about 15 Ts, generally between about 4 Ts to about 6 Ts, or about 3, 4, 5, 6, 7, 8, 9, 10, 11, 12, 13, 14 or 15 Ts.

TABLE 17

LAMP Assay Designs for Primer Group 6 (Terpinolene)
Primer Group 6: TPS37FN - 1638-1846 - Exon 7 - gDNA/cDNA LAMP Design:

| 1 | ID:1 | | dimer(minimum)dG=-1.67 | | | | | |
|---|---|---|---|---|---|---|---|---|
| label | 5′pos | 3′pos | len | Tm | 5′dG | 3′dG | GCrate | Sequence |
| F3 | 13 | 32 | 20 | 55.81 | -4.69 | -4.34 | 0.40 | AAGAGGAGATGTTCCGAAAT (SEQ ID NO: 1411) |
| B3 | 221 | 239 | 19 | 55.87 | -4.60 | -4.76 | 0.47 | TCTGAGAAGCATGTCCATC (SEQ ID NO: 1412) |
| FIP | | | 45 | | | | | TCAAAAATTTGATGTGCTCGCGA-AATGTTACATGAACGATACAGG (SEQ ID NO: 1413) |
| BIP | | | 50 | | | | | CTCGAAAGAAGTTGTTCATGTTTGC-CCATAAAGGTATATAAATTTGGCTG (SEQ ID NO: 1414) |
| F2 | 39 | 60 | 22 | 55.81 | -3.71 | -4.58 | 0.36 | AATGTTACATGAACGATACAGG (SEQ ID NO: 1415) |
| F1c | 79 | 101 | 23 | 61.84 | -3.69 | -6.69 | 0.39 | TCAAAAATTTGATGTGCTCGCGA (SEQ ID NO: 1416) |
| B2 | 195 | 219 | 25 | 55.95 | -3.74 | -6.25 | 0.32 | CCATAAAGGTATATAAATTTGGCTG (SEQ ID NO: 1417) |
| B1c | 154 | 178 | 25 | 61.22 | -5.04 | -5.17 | 0.40 | CTCGAAAGAAGTTGTTCATGTTTGC (SEQ ID NO: 1418) |

Primer Group 6: TPS37FN - 1400-1626 - Exon 6 - gDNA/cDNA LAMP Design:

| ID:25 | | dimer(minimum)dG:::-2.28 | | | | | | |
|---|---|---|---|---|---|---|---|---|
| label | 5′pos | 3′pos | len | Tm | 5′dG | 3′dG | GCrate | Sequence |
| F3 | 84 | 105 | 22 | 55.82 | -2.98 | -5.00 | 0.36 | AGAATACATGGATTTCAGTTGG (SEQ ID NO: 1419) |
| B3 | 292 | 310 | 19 | 57.80 | -6.37 | -5.25 | 0.53 | CGACGATGTTCCTAGGTCA (SEQ ID NO: 1326) |
| FIP | | | 47 | | | | | GGATCATCATAACCTTCTTCCAAGATCTTTTGCATGCTTATTTTGCT (SEQ ID NO: 1287) |
| BIP | | | 47 | | | | | TGAAGGATCCCTGGAAATATCAAATTCTTCAAGTCGTAAAAGTATGG (SEQ ID NO: 1288) |
| F2 | 118 | 139 | 22 | 57.40 | -3.52 | -4.91 | 0.32 | TCTTTTGCATGCTTATTTTGCT (SEQ ID NO: 1289) |
| F1c | 174 | 198 | 25 | 60.23 | -4.76 | -4.86 | 0.40 | GGATCATCATAACCTTCTTCCAAGA (SEQ ID NO: 1290) |
| B2 | 270 | 291 | 22 | 55.41 | 4.27 | -4.23 | 0.36 | TCTTCAAGTCGTAAAAGTATGG (SEQ ID NO: 1291) |
| B1c | 214 | 238 | 25 | 60.09 | -4.86 | -3.57 | 0.36 | TGAAGGATCCCTGGAAATATCAAAT (SEQ ID NO: 1292) |
| LF | 142 | 166 | 25 | 60.48 | -5.70 | -4.33 | 0.40 | GGAAGCTTTTTCTAAGGGATTTGTG (SEQ ID NO: 1293) |

TABLE 18

LAMP Assay Designs for Primer Group 1 (a-pinene > β-pinene)
Primer Group 1: TPS2SK - 384-781 - Exon 3 - gDNA/cDNA LAMP Design - degenerate; common to SK and FN

| | dimer(minimum)dG=-2.16 | | | | | | | |
|---|---|---|---|---|---|---|---|---|
| label | 5′pos | 3′pos | len | Tm | 5′dG | 3′dG | GCrate | Sequence |
| F3 | 62 | 85 | 24 | 55.69 | -2.63 | -4.09 | 0.33 | GATATTAAGGGAGTATTGGCTTTA (SEQ ID NO: 1420) |
| B3 | 275 | 297 | 23 | 55.73 | -3.03 | -5.00 | 0.30 | TCATATTCTTCAATGAACCACTT (SEQ ID NO: 1421) |
| FIP | | | 48 | | | | | TGAGATATTCTGTTGTGAAAACCCTTTCATTCTATGTGAAAAATGGYG (SEQ ID NO: 1422) |
| BIP | | | 46 | | | | | TATGGCAATATTAGTGAGACATGCCGCTTCTGCTCTTATAGTCCTC (SEQ ID NO: 1423) |
| F2 | 94 | 116 | 23 | 57.66 | -3.57 | -6.57 | 0.35 | TTCATTCTATGTGAAAAATGGYG (SEQ ID NO: 1424) |
| Flc | 137 | 161 | 25 | 60.32 | -4.15 | -5.34 | 0.36 | TGAGATATTCTGTTGTGAAAACCCT (SEQ ID NO: 1425) |
| B2 | 253 | 273 | 21 | 56.84 | --5.09 | --5.20 | 0.48 | GCTTCTGCTCTTATAGTCCTC (SEQ ID NO: 1426) |
| B1c | 208 | 232 | 25 | 60.81 | -4.98 | -5.90 | 0.40 | TATGGCAATATTAGTGAGACATGCC (SEQ ID NO: 1427) |

Primer Group 1: TPS2SK - 1302-1549 - Exon 7 - gDNA/cDNA LAMP Design - degenerate; common to SK and FN

| | | | | | | | | |
|---|---|---|---|---|---|---|---|---|
| 1 | ID:9 | | dimer(minimum)dG=-2.38 | | | | | |
| label | 5′pos | 3′pos | len | Tm | 5′dG | 3′dG | GCrate | Sequence |
| F3 | 25 | 43 | 19 | 55.35 | -4.53 | -4.16 | 0.42 | TTTGGAAGAGGCAAAATGG (SEQ ID NO: 1428) |
| B3 | 220 | 239 | 20 | 55.53 | -3.80 | -4.67 | 0.45 | GATCATCTGCAAGTCGTAAC (SEQ ID NO: 1429) |
| FIP | | | 41 | | | | | CCTATTGAAAGCGAGGCGTT-YTATAGCGGATACAAACCAAC (SEQ ID NO: 1430) |
| BIP | | | 42 | | | | | ACAAAGTCCATAACAAAYGAGGCCAAGGATCCTTGGCGACAT (SEQ ID NO: 1431) |
| F2 | 46 | 66 | 21 | 55.24 | -2.31 | -5.16 | 0.38 | YTATAGCGGATACAAACCAAC (SEQ ID NO: 1432) |
| F1c | 86 | 105 | 20 | 60.15 | -3.57 | --6.68 | 0.50 | CCTATTGAAAGCGAGGCGTT (SEQ ID NO: 1433) |
| B2 | 199 | 216 | 18 | 57.68 | -4.24 | -5.23 | 0.50 | AAGGATCCTTGGCGACAT (SEQ ID NO: 1434) |
| B1c | 143 | 166 | 24 | 61.55 | -4.16 | -6.54 | 0.42 | ACAAAGTCCATAACAAAYGAGGCC (SEQ ID NO: 1435) |
| LB | 176 | 195 | 20 | 60.12 | -4.65 | -5.42 | 0.50 | TTGCAAGAGGGTCATYACGC (SEQ ID NO: 1436) |

TABLE 19

LAMP Assay Designs for Primer Group 3 (a-pinene > β-pinene)
Primer Group 3: TPS30PK - Exon 2 - - gDNA/cDNA LAMP Design

| 2 | ID:1 | | dimer(minimum)dG=-1.74 | | | | | |
|---|---|---|---|---|---|---|---|---|
| label | 5′pos | 3′pos | len | Tm | 5′dG | 3′dG | GCrate | Sequence |
| F3 | 2 | 19 | 18 | 55.97 | -5.30 | -5.92 | 0.50 | GGAAGGAGCATATGCCAA (SEQ ID NO: 1437) |
| B3 | 219 | 241 | 23 | 56.58 | -3.82 | -5.40 | 0.35 | AGTCTAAATTCAAGAGAATTGGC (SEQ ID NO: 1438) |
| FIP | | | 45 | | | | | GCTTCTCCTCCTCTTTTGCTCTCGAGTTGAGAAAGTAAAGGAAGA (SEQ ID NO: 1439) |
| BIP | | | 48 | | | | | AAGACTTGGAATCTCTTACCACTTT-GTGTTGTACACATTATTGTTGTT (SEQ ID NO: 1440) |
| F2 | 22 | 43 | 22 | 55.05 | -4.51 | -4.71 | 0.36 | GAGTTGAGAAAGTAAAGGAAGA (SEQ ID NO: 1441) |
| F1c | 62 | 84 | 23 | 62.60 | -5.09 | -5.44 | 0.52 | GCTTCTCCTCCTCTTTTGCTCTC (SEQ ID NO: 1442) |
| B2 | 180 | 202 | 23 | 55.55 | -4.82 | -4.32 | 0.30 | GTGTTGTACACATTATTGTTGTT (SEQ ID NO: 1443) |
| B1c | 119 | 143 | 25 | 60.05 | -4.24 | -4.16 | 0.36 | AAGACTTGGAATCTCTTACCACTTT (SEQ ID NO: 1444) |

Primer Group 3: TPS30PK - Exon 2 - - gDNA/cDNA LAMP Design

| ID:5 | | dimer(minimum)dG=-1.87 | | | | | | |
|---|---|---|---|---|---|---|---|---|
| label | 5′pos | 3′pos | len | Tm | 5′dG | 3′dG | GCrate | Sequence |
| F3 | 10 | 30 | 21 | 55.48 | -2.85 | -4.27 | 0.38 | CATATGCCAAAAGAGTTGAGA (SEQ ID NO: 1445) |
| B3 | 203 | 225 | 23 | 55.78 | -4.16 | -4.33 | 0.30 | AATTGGCATACACATTATTGTTG (SEQ ID NO: 1446) |
| FIP | | | 46 | | | | | TCAAGTTGAGATAAAGGCTTCTCC-AGGAAGAGGTAAGAGTAATGGT (SEQ ID NO: 144′7) |
| BIP | | | 48 | | | | | AAGACTTGGAATCTCTTACCACTTT-GTGTTGTACACATTATTGTTGTT (SEQ ID NO: 1440) |
| F2 | 37 | 58 | 22 | 57.59 | -4.69 | -4.55 | 0.41 | AGGAAGAGGTAAGAGTAATGGT (SEQ ID NO: 1448) |
| F1c | 77 | 100 | 24 | 60.26 | -4.41 | -4.71 | 0.42 | TCAAGTTGAGATAAAGGCTTCTCC (SEQ ID NO: 1449) |
| B2 | 180 | 202 | 23 | 55.55 | -4.82 | -4.32 | 0.30 | GTGTTGTACACATTATTGTTGTT (SEQ ID NO: 1443) |
| B1c | 119 | 143 | 25 | 60.05 | -4.24 | -4.16 | 0.36 | AAGACTTGGAATCTCTTACCACTTT (SEQ ID NO: 1444) |

TABLE 20

LAMP Assay Designs for Primer Group 12 (β-ocimene producing; Accession No. KY014563)
Primer Group 12: TPS6FN - 1224-1495 - Exon 6 - gDNA/cDNA LAMP Design

| | dimer(minimum)dG=-2.46 | | | | | | | |
|---|---|---|---|---|---|---|---|---|
| label | 5′pos | 3′pos | len | Tm | 5′dG | 3′dG | GCrate | Sequence |
| F3 | 4 | 26 | 23 | 56.28 | -6.04 | -4.01 | 0.35 | GGTCGATATGTGTAAAAGTTTCT (SEQ ID NO: 1450) |
| B3 | 218 | 235 | 18 | 55.12 | -4.98 | -4.73 | 0.44 | TATGGCACTGTGACGAAT (SEQ ID NO: 1451) |
| FIP | | | 45 | | | | | TCCTACTGAAATCCAACCATTTT CA---GCAAGAGGCAAAATGGTACT (SEQ ID NO: 1452) |
| BIP | | | 45 | | | | | CTTGTGCATGCTTATTTTTTTCA CG-AACCATATTCCAAGCATTCG (SEQ ID NO: 1453) |
| F2 | 28 | 47 | 20 | 57.95 | -5.26 | -4.57 | 0.45 | GCAAGAGGCAAAATGGTACT (SEQ ID NO: 1454) |
| F1c | 82 | 106 | 25 | 60.59 | -4.43 | -3.69 | 0.36 | TCCTACTGAAATCCAACCATTTT CA (SEQ ID NO: 1455) |
| B2 | 184 | 203 | 20 | 55.57 | -4.55 | -4.84 | 0.40 | AACCATATTCCAAGCATTCG (SEQ ID NO: 1456) |
| B1c | 119 | 143 | 25 | 60.29 | -4.66 | -5.35 | 0.36 | CTTGTGCATGCTTATTTTTTTCA CG (SEQ ID NO: 1457) |
| LF | 51 | 73 | 23 | 60.92 | -4.53 | -4.90 | 0.43 | TTCCAATGTTGGTGTGTATCCAC (SEQ ID NO: 1458) |

Primer Group 12: TPS6FN - 1224-1495 - Exon 6 - gDNA/cDNA LAMP Design

| ID:5 | | dimer(minimum)dG=-2.33 | | | | | | |
|---|---|---|---|---|---|---|---|---|
| label | 5′pos | 3′pos | len | Tm | 5′dG | 3′dG | GCrate | Sequence |
| F3 | 20 | 37 | 18 | 55.97 | -4.01 | -6.10 | 0.44 | AGTTTCTTGCAAGAGGCA (SEQ ID NO: 1459) |
| B3 | 219 | 236 | 18 | 55.35 | -3.74 | -5.20 | 0.44 | TTATGGCACTGTGACGAA (SEQ ID NO: 1460) |
| FIP | | | 50 | | | | | TCCTACTGAAATCCAACCATTTTCAAAATGGTACTATAGTGGATACACAC (SEQ ID NO: 1461) |
| BIP | | | 45 | | | | | CTTGTGCATGCTTATTTTTTTCACG-ACCATATTCCAAGCATTCGA (SEQ ID NO: 1462) |
| F2 | 38 | 62 | 25 | 57.91 | -4.16 | -5.21 | 0.36 | AAATGGTACTATAGTGGATACACAC (SEQ ID NO: 1463) |
| F1c | 82 | 106 | 25 | 60.59 | -4.43 | -3.69 | 0.36 | TCCTACTGAAATCCAACCATTTTCA (SEQ ID NO: 1455) |
| B2 | 183 | 202 | 20 | 56.53 | -4.13 | -4.59 | 0.40 | ACCATATTCCAAGCATTCGA (SEQ ID NO: 1464) |
| B1c | 119 | 143 | 25 | 60.29 | -4.66 | -5.35 | 0.36 | CTTGTGCATGCTTATTTTTTTCACG (SEQ ID NO: 1457) |

TABLE 21

LAMP Assay Design for Primer Group 13 (Accession No. KY014558)
Primer Group 13: TPS13PK - Exon 6 - Degenerate - gDNA/cDNA LAMP Design

| label | 5′pos | 3′pos | len | Tm | 5′dG | 3′dG | GCrate | Sequence |
|---|---|---|---|---|---|---|---|---|
| F3 | 15 | 39 | 25 | 56.76 | -4.56 | -5.24 | 0.32 | GCAAATCTTATTTAAGAGAAGCAAG (SEQ ID NO: 1465) |
| B3 | 207 | 228 | 22 | 55.03 | -4.18 | -4.06 | 0.36 | CGTAAAATCATRGATGAATGTC (SEQ ID NO: 1466) |
| FIP | | | 49 | | | | | GGYCCTGATATTGATATCCATGCATATGGTATTATAATGGATACACACC (SEQ ID NO: 1467) |
| BIP | | | 48 | | | | | TTGTAGTGAATCCAAWCAAGGAARAGTATTATGGTAGGGTATCCATCA (SEQ ID NO: 1468) |
| F2 | 40 | 63 | 24 | 55.76 | -4.13 | -5.66 | 0.33 | ATGGTATTATAATGGATACACACC (SEQ ID NO: 1469) |
| F1c | 87 | 111 | 25 | 60.49 | -5.69 | -4.41 | 0.40 | GGYCCTGATATTGATATCCATGCAT (SEQ ID NO: 1470) |
| B2 | 184 | 206 | 23 | 56.36 | -2.47 | -4.91 | 0.39 | GTATTATGGTAGGGTATCCATCA (SEQ ID NO: 1471) |
| B1c | 138 | 162 | 25 | 60.09 | -3.74 | -4.71 | 0.36 | TTGTAGTGAATCCAAWCAAGGAARA (SEQ ID NO: 1472) |

TABLE 22

LAMP Assay Designs for Primer Group 2
Primer Group 2: TPS5FN - Specific from TPS5PK - - gDNA/cDNA LAMP Design

| | | | dimer(minimum)dG=-2.18 | | | | | |
|---|---|---|---|---|---|---|---|---|
| label | 5′pos | 3′pos | len | Tm | 5′dG | 3′dG | GCrate | Sequence |
| F3 | 206 | 227 | 22 | 55.03 | -2.63 | -4.58 | 0.32 | ATTATCATCATCATGGTCAACA (SEQ ID NO: 1473) |
| B3 | 378 | 398 | 21 | 56.77 | -5.43 | -4.18 | 0.38 | AGACGAGAAAAAGGAGTTCAA (SEQ ID NO: 1474) |
| FIP | | | 43 | | | | | GATGAAGCAAGAGATTTCACAACCATTGACCTTGCCTCGTCAT (SEQ ID NO: 1475) |
| BIP | | | 47 | | | | | TATGGGTTCACCCCTAAATGAATAGGGAGAGTTTGAGTAAAGATGTG (SEQ ID NO: 1476) |
| F2 | 230 | 247 | 18 | 57.86 | -5.02 | -5.23 | 0.50 | TTGACCTTGCCTCGTCAT (SEQ ID NO: 1477) |
| F1c | 271 | 295 | 25 | 61.73 | -3.92 | -5.17 | 0.40 | GATGAAGCAAGAGATTTCACAACCA (SEQ ID NO: 1478) |
| B2 | 356 | 377 | 22 | 56.00 | -5.04 | -4.56 | 0.41 | GGAGAGTTTGAGTAAAGATGTG (SEQ ID NO: 1479) |
| B1c | 299 | 323 | 25 | 60.07 | -4.58 | -3.08 | 0.40 | TATGGGTTCACCCCTAAATGAATAG (SEQ ID NO: 1480) |
| LB | 329 | 353 | 25 | 60.75 | -5.93 | -4.24 | 0.40 | AGCCTCATATAGACATACCATTCCT (SEQ ID NO: 1.481) |

Primer Group 2: TPSSFN — Specific from TPS5PK - - gDNA/cDNA LAMP Design

| | | | dimer(minimum)dG=-2.02 | | | | | |
|---|---|---|---|---|---|---|---|---|
| label | 5′pos | 3′pos | len | Tm | 5′dG | 3′dG | GCrate | Sequence |
| F3 | 224 | 242 | 19 | 55.32 | -3.71 | -6.10 | 0.42 | AACATTTTGACCTTGCCTC (SEQ ID NO: 1.482) |
| B3 | 394 | 414 | 21 | 55.25 | -3.69 | -5.18 | 0.33 | TTTTCAATGCTTTCAAAGACG (SEQ ID NO: 1483) |
| FIP | | | 49 | | | | | AGGGGTGAACCCATATTAGATGAAGGTCATCATCAAGTATTGTTTGAGA (SEQ ID NO: 1484) |
| BIP | | | 47 | | | | | AGCCTCATATAGACATACCATTCCTAGAAAAAGGAGTTCAAGGAGAG (SEQ ID NO: 1485) |
| F2 | 243 | 266 | 24 | 56.79 | -4.41 | -4.27 | 0.33 | GTCATCATCAAGTATTGTTTGAGA (SEQ ID NO: 1486) |
| F1c | 289 | 313 | 25 | 61.91 | -6.18 | -3.90 | 0.44 | AGGGGTGAACCCATATTAGATGAAG (SEQ ID NO: 1487) |
| B2 | 372 | 393 | 22 | 57.39 | -3.52 | -5.04 | 0.41 | AGAAAAAGGAGTTCAAGGAGAG (SEQ ID NO: 1488) |
| B1c | 329 | 353 | 25 | 60.75 | -5.93 | -4.24 | 0.40 | AGCCTCATATAGACATACCATTCCT (SEQ ID NO: 1481) |

TABLE 23

LAMP Assay Design for Primer Group 4 (Terpinolene and only α-pinene producing)
Primer Group 4: TPS32PK — Exon 7 — 1425-1728 — Unique to TPS32PK - - gDNA/cDNA LAMP Design

| 3 | ID:3 | | dimer(minimum)dG=-2.16 | | | | | |
|---|---|---|---|---|---|---|---|---|
| label | 5′pos | 3′pos | len | Tm | 5′dG | 3′dG | GCrate | Sequence |
| F3 | 22 | 43 | 22 | 56.09 | -4.18 | -4.74 | 0.36 | GAACAAGGAAATGATTCCATCT (SEQ ID NO: 1489) |
| B3 | 195 | 219 | 25 | 56.26 | -4.67 | -4.91 | 0.32 | GAACACATAAGGAATTTAATCAGTG (SEQ ID NO: 1490) |
| FIP | | | 50 | | | | | TTCGTTAGGACAGCAATGATGATAT-GTAATGATCAAAATTAGTACCAACC (SEQ ID NO: 1491) |
| BIP | | | 47 | | | | | ATGGCAGTTTCAATAAAAGCTTGAG-CATGGAAGGAAATGAATGAAGC (SEQ ID NO: 1492) |
| F2 | 49 | 73 | 25 | 56.04 | -3.39 | -5.61 | 0.32 | GTAATGATCAAAATTAGTACCAACC (SEQ ID NO: 1493) |
| F1c | 93 | 117 | 25 | 60.23 | -4.85 | -3.03 | 0.36 | TTCGTTAGGACAGCAATGATGATAT (SEQ ID NO: 1494) |
| B2 | 170 | 191 | 22 | 57.54 | -4.91 | -5.26 | 0.41 | CATGGAAGGAAATGAATGAAGC (SEQ ID NO: 1495) |
| B1c | 122 | 146 | 25 | 60.49 | -5.80 | -4.35 | 0.36 | ATGGCAGTTTCAATAAAAGCTTGAG (SEQ ID NO: 1496) |
| LB | 150 | 169 | 20 | 61.89 | -4.74 | -5.43 | 0.55 | ATGGAGACTCACCCACTCGA (SEQ ID NO: 1497 ) |

TABLE 24

LAMP Assay Designs for Primer Group 14 (Accession No. MK614217)
Primer Group 14: TPS38FN - Specific — Exon 3 — gDNA/cDNA LAMP Design

| 1 | ID:7 | | dimer(minimum)dG=1.85 | | | | | |
|---|---|---|---|---|---|---|---|---|
| label | 5′pos | 3′pos | len | Tm | 5′dG | 3′dG | GCrate | Sequence |
| F3 | 160 | 184 | 25 | 56.10 | -4.46 | -4.74 | 0.32 | CGAAAATTACATGATGATAACAGAG (SEQ ID NO: 1498) |
| B3 | 332 | 350 | 19 | 55.47 | -4.65 | -4.16 | 0.37 | TTGCAAACTCAAGCAAAGT (SEQ ID NO: 1499) |
| FIP | | | 50 | | | | | AAGCTCTAACGCATGTCTAATTACT-GAAAACAAATTAGATGATGACGATG (SEQ ID NO: 1500) |
| BIP | | | 45 | | | | | CACTTCATTGGAGGACTGCAA-GAATTCATATCTTGTCTTTTCTCG (SEQ ID NO: 1501) |
| F2 | 185 | 209 | 25 | 56.78 | -3.78 | -5.23 | 0.32 | GAAAACAAATTAGATGATGACGATG (SEQ ID NO: 1502) |
| F1c | 229 | 253 | 25 | 60.13 | -5.09 | -3.12 | 0.36 | AAGCTCTAACGCATGTCTAATTACT (SEQ ID NO: 1503) |
| B2 | 307 | 330 | 24 | 55.55 | -3.09 | -5.04 | 0.33 | GAATTCATATCTTGTCTTTTCTCG (SEQ ID NO: 1504) |
| B1c | 255 | 275 | 21 | 60.19 | -4.51 | -5.41 | 0.48 | CACTTCATTGGAGGACTGCAA (SEQ ID NO: 1505) |
| LB | 283 | 305 | 23 | 60.57 | -6.36 | -3.17 | 0.43 | GGCCAAGTGGTTTATCGATGTAT (SEQ ID NO: 1506) |

Primer Group 14: TPS38FN — Common- Exon 3 — gDNA/cDNA LAMP Design

| 1 | ID:7 | | dimer(minimnm)dG=-2.34 | | | | | |
|---|---|---|---|---|---|---|---|---|
| label | 5′pos | 3′pos | len | Tm | 5′dG | 3′dG | GCrate | Sequence |
| F3 | 184 | 208 | 25 | 57.82 | -4.13 | -5.08 | 0.32 | GGAAAACAAATTAGATGATGACGAT (SEQ ID NO: 1507) |
| B3 | 370 | 389 | 20 | 56.09 | -5.18 | -4.06 | 0.40 | CGTCTTGATGCATTGATTGT (SEQ ID NO: 1508) |
| FIP | | | 45 | | | | | CTCCGTTCTTGCAGTCCTCC- ATTGTAGTAATTAGACATGCGTTAG (SEQ ID NO: 1509) |
| BIP | | | 47 | | | | | GCCAAGTGGTTTATCGATGTATACGCCATGTTGAAATCTAGTTTTGC (SEQ ID NO: 1510) |
| F2 | 224 | 248 | 25 | 56.85 | -3.29 | -4.51 | 0.32 | ATTGTAGTAATTAGACATGCGTTAG (SEQ ID NO: 1511) |
| F1c | 264 | 283 | 20 | 61.97 | -6.02 | -5.55 | 0.60 | CTCCGTTCTTGCAGTCCTCC (SEQ ID NO: 1512 ) |
| B2 | 347 | 368 | 22 | 55.70 | -5.05 | -4.68 | 0.36 | CCATGTTGAAATCTAGTTTTGC (SEQ ID NO: 1513) |
| B1c | 284 | 308 | 25 | 61.58 | -5.85 | -3.64 | 0.44 | GCCAAGTGGTTTATCGATGTATACG (SEQ ID NO: 1514) |

TABLE 25

LAMP Assay Designs for Primer Group 7
Primer Group 7: TPS18Choc — Exon 3 - Specific - R-Linalool Nerolidol — LAMP Design

| 1 | ID:40 | | dimer(minimum)dG=-2.46 | | | | | |
|---|---|---|---|---|---|---|---|---|
| label | 5′pos | 3′pos | len | Tm | 5′dG | 3′dG | GCrate | Sequence |
| F3 | 55 | 72 | 18 | 55.84 | -4.43 | -5.34 | 0.50 | AGAGAGGACATCAAGGGT (SEQ ID NO: 1515) |
| B3 | 234 | 255 | 22 | 55.05 | -4.86 | -4.91 | 0.36 | CTTGGATAAACTTTTGTGAGTG (SEQ ID NO: 1516) |
| FIP | | | 46 | | | | | GCACTAAATAAAGCAGCTTCATCAA-GCTGAGCTTATATGAAGCCTC (SEQ ID NO: 1517) |
| BIP | | | 41 | | | | | CAACACTTGGAAGCGTCCAT-TTTGAAGTGTAGTTGCCACAT (SEQ ID NO: 1518) |
| F2 | 75 | 95 | 21 | 57.79 | -5.59 | -5.93 | 0.48 | GCTGAGCTTATATGAAGCCTC (SEQ ID NO: 1519) |
| F1c | 125 | 149 | 25 | 60.26 | -4.98 | -4.07 | 0.36 | GCACTAAATAAAGCAGCTTCATCAA (SEQ ID NO: 1520) |
| B2 | 209 | 229 | 21 | 57.70 | -3.69 | -5.05 | 0.38 | TTTGAAGTGTAGTTGCCACAT (SEQ ID NO: 1521) |
| B1c | 151 | 170 | 20 | 60.36 | -4.82 | -4.90 | 0.50 | CAACACTTGGAAGCGTCCAT (SEQ ID NO: 1522) |
| LF | 96 | 120 | 25 | 60.14 | -3.17 | -4.74 | 0.40 | ATTTTCTCCCTCTATGCATAGATGG (SEQ ID NO: 1523) |
| LB | 171 | 195 | 25 | 60.97 | -5.84 | -3.92 | 0.40 | GACACGTCTTCATCGTTATGATCAA (SEQ ID NO: 1524) |

### Anti-Nociceptive

[0063] Primer Group 4: TPS32PK is above in Table 23

TABLE 26

LAMP Assay Designs for Primer Group 8 (The B3 and F3 primers can be used to specifically Identify/select plant cultivars expressing TPSSPK and not TPS5FN)
Primer Group 8: TPS5PK - Specific against TPS5FN - gDNA/cDNA LAMP Design

| 1 | ID:53 | | dimer(minimum)dG=-1.69 | | | | | |
|---|---|---|---|---|---|---|---|---|
| label | 5′pos | 3′pos | len | Tm | 5′dG | 3′dG | GCrate | Sequence |
| F3 | 526 | 548 | 23 | 56.42 | -3.98 | -4.29 | 0.30 | AGAGATTTCACAACAAAACATCT (SEQ ID NO: 1525) |
| B3 | 744 | 766 | 23 | 55.39 | -2.98 | -4.27 | 0.30 | AATCTAGTTTAGCAAGTTGAAGA (SEQ ID NO: 1526) |
| FIP | | | 44 | | | | | CAAAGCATGCTCCACTAATTTCACC-ATGATGACGAGGCAAGGTA (SEQ ID NO: 1527) |
| BIP | | | 50 | | | | | AGTGCATTGGAGAATGAAAAGGTTG-TGAATTCATATGATGATGATGAGAC (SEQ ID NO: 1528) |
| F2 | 562 | 580 | 19 | 57.57 | -3.95 | -4.08 | 0.47 | ATGATGACGAGGCAAGGTA (SEQ ID NO: 1529) |
| F1c | 621 | 645 | 25 | 62.74 | -5.01 | -5.02 | 0.44 | CAAAGCATGCTCCACTAATTTCACC (SEQ ID NO: 1530) |
| B2 | 714 | 738 | 25 | 56.74 | -3.57 | -4.76 | 0.32 | TGAATTCATATGATGATGATGAGAC (SEQ ID NO: 1531) |
| B1c | 654 | 678 | 25 | 62.25 | -5.80 | -5.00 | 0.40 | AGTGCATTGGAGAATGAAAAGGTTG (SEQ ID NO: 1532) |
| LB | 679 | 703 | 25 | 61.20 | -6.10 | -3.17 | 0.40 | GAGGCAAGGTGGTTTATTGATATGT (SEQ ID NO: 1533) |

Primer Groups 2 & 8: TPS5PK/FN - Designed for PK but may work for FN - gDNA/cDNA LAMP Design

| 1 | ID:4 6 | | dimer(minimum)dG=-2.38 | | | | | |
|---|---|---|---|---|---|---|---|---|
| label | 5′pos | 3′pos | len | Tm | 5′dG | 3′dG | GCrate | Sequence |
| F3 | 550 | 571 | 22 | 55.44 | -3.83 | -5.60 | 0.32 | AAACAATACTTGATGATGACGA (SEQ ID NO: 1534) |
| B3 | 744 | 766 | 23 | 55.39 | -2.98 | -4.27 | 0.30 | AATCTAGTTTAGCAAGTTGAAGA (SEQ ID NO: 1526) |
| FIP | | | 49 | | | | | CAAAGCATGCTCCACTAATTTCACC-GGCAAGGTAAAACTATATCTGTTG (SEQ ID NO: 1535) |
| BIP | | | 50 | | | | | AGTGCATTGGAGAATGAAAAGGTTG-TGAATTCATATGATGATGATGAGAC (SEQ ID NO: 1528) |
| F2 | 572 | 595 | 24 | 57.38 | -5.85 | -4.66 | 0.38 | GGCAAGGTAAAACTATATCTGTTG (SEQ ID NO: 1536) |
| F1c | 621 | 645 | 25 | 62.74 | -5.01 | -5.02 | 0.44 | CAAAGCATGCTCCACTAATTTCACC (SEQ ID NO: 1530) |
| B2 | 714 | 738 | 25 | 56.74 | -3.57 | -4.76 | 0.32 | TGAATTCATATGATGATGATGAGAC (SEQ ID NO: 1531) |
| B1c | 654 | 678 | 25 | 62.25 | -5.80 | -5.00 | 0.40 | AGTGCATTGGAC4AATC;AAAAC3GTTG (SEQ ID NO: 1532) |
| LB | 679 | 703 | 25 | 61.20 | -6.10 | -3.17 | 0.40 | GAGGCAAGGTGGTTTATTGATATGT (SEQ ID NO: 1533) |

TABLE 27

LAMP Assay Designs for Primer Group 11
Primer Group 11: TPS35LS-Cs10 — Exon 2 - - gDNA/cDNA LAMP Design

| 1 | ID:1 | | dimer(minimum)dG=-2.28 | | | | | |
|---|---|---|---|---|---|---|---|---|
| label | 5′pos | 3′pos | len | Tm | 5dG | 3′dG | GCrate | Sequence |
| F3 | 90 | 112 | 23 | 56.61 | -4.25 | -4.41 | 0.35 | TGGTTACTAATATGGTCACTGAA (SEQ ID NO: 1537) |
| B3 | 262 | 284 | 23 | 55.93 | -4.57 | -4.27 | 0.35 | ACGTAATATACGAGAGATGAAGA (SEQ ID NO: 1538) |
| FIP | | | 46 | | | | | AGTCGGCATTGATTATCATGTCC-ATTATATGTTCCCTTTCAAGGAT (SEQ ID NO: 1539) |
| BIP | | | 45 | | | | | GCACAGCGTTGACCAAGTTCCGTAATGAACAGTATTATTTTGGCT (SEQ ID NO: 1540) |
| F2 | 114 | 136 | 23 | 55.07 | -1.86 | -4.24 | 0.30 | ATTATATGTTCCCTTTCAAGGAT (SEQ ID NO: 1541) |
| F1c | 154 | 176 | 23 | 60.60 | -6.02 | -4.90 | 0.43 | AGTCGGCATTGATTATCATGTCC (SEQ ID NO: 1542) |
| B2 | 236 | 260 | 25 | 57.81 | -4.06 | -5.75 | 0.32 | CGTAATGAACAGTATTATTTTGGCT (SEQ ID NO: 1543) |
| B1c | 181 | 200 | 20 | 61.67 | -5.90 | -4.01 | 0.55 | GCACAGCGTTGACCAAGTTC (SEQ ID NO: 1544) |

Primer Group 11: TPS35LS-Cs10 — Exon 7 - - gDNA/cDNA LAMP Design

| 1 | ID:1 5 | | dimer(minimum)dG=-2.35 | | | | | |
|---|---|---|---|---|---|---|---|---|
| label | 5′pos | 3′pos | len | Tm | 5′dG | 3′dG | GCrate | Sequence |
| F3 | 16 | 33 | 18 | 57.79 | -6.24 | -4.85 | 0.50 | ATGG(3CATGAT(3GGTCTT (SEQ ID NO: 1545) |
| B3 | 185 | 203 | 19 | 55.25 | -4.55 | -4.14 | 0.42 | AACCATCCTAGCAGCATTA (SEQ ID NO: 1546) |
| FIP | | | 42 | | | | | AATCACTTGCTCCCTTGCTTC-TTGAGTGCTACATGAAAAGAC (SEQ ID NO: 1547) |
| BIP | | | 43 | | | | | ATGATTAAAAATGAGTGGGAACGCC-TTTCTGAAGCACATGGGA (SEQ ID NO: 1548) |
| F2 | 37 | 57 | 21 | 55.65 | -4.41 | -4.01 | 0.38 | TTGAGTGCTACATGAAAAGAC (SEQ ID NO: 1549) |
| F1c | 78 | 98 | 21 | 60.55 | -4.06 | -5.26 | 0.48 | AATCACTTGCTCCCTTGCTTC (SEQ ID NO: 1550) |
| B2 | 158 | 175 | 18 | 55.34 | -4.02 | -5.25 | 0.44 | TTTCTGAAGCACATGGGA (SEQ ID NO: 1551) |
| B1c | 102 | 126 | 25 | 62.10 | -3.45 | -6.68 | 0.40 | ATGATTAAAAATGAGTGGGAACGCC (SEQ ID NO: 1552) |

TABLE 28

LAMP Assay Designs for Primer Group 5
Primer Group 5: TPS31PK - Common - Exon 3 - - gDNA/cDNA LAMP Design

| 1 | ID:24 | | dimer(minimum)dG=-2.47 | | | | | |
|---|---|---|---|---|---|---|---|---|
| label | 5′pos | 3′pos | len | Tm | 5′dG | 3′dG | GCrate | Sequence |
| F3 | 373 | 393 | 21 | 55.94 | -5.63 | -4.01 | 0.38 | ACTGCTCTTCATTTCAAACTC (SEQ ID NO: 1553) |
| B3 | 552 | 572 | 21 | 56.20 | -4.82 | -5.26 | 0.38 | GTTGTGAAATCTCTTGCTTCA (SEQ ID NO: 1554) |
| FIP | | | 48 | | | | | TCCTTGAACTCATTTTTCTCGTCTT-CTTAGACAATATGGATTCAGTCC (SEQ ID NO: 1555) |
| BIP | | | 45 | | | | | AAGTAAGGATGTGAAAGGAATGGT-CTAATATGGGTTCACCCCTAA (SEQ ID NO: 1556) |
| F2 | 394 | 416 | 23 | 55.92 | -3.43 | -5.35 | 0.39 | CTTAGACAATATGGATTCAGTCC (SEQ ID NO: 1557) |
| F1c | 446 | 470 | 25 | 60.68 | -4.86 | -5.18 | 0.36 | TCCTTGAACTCATTTTTCTCGTCTT (SEQ ID NO: 1558) |
| B2 | 530 | 550 | 21 | 55.95 | -2.31 | -4.53 | 0.43 | CTAATATGGGTTCACCCCTAA (SEQ ID NO: 1559) |
| B1c | 477 | 500 | 24 | 60.04 | -3.24 | -4.55 | 0.38 | AAGTAAGGATGTGAAAGGAATGGT (SEQ ID NO: 1560) |

Primer Group 5: TPS31PK - Specific- Exon 3 - - gDNA/cDNA LAMP Design

| | | | | | | | | |
|---|---|---|---|---|---|---|---|---|
| 2 | ID:7 8 | | dimer(minimum)dG=-2.13 | | | | | |
| label | 5′pos | 3′pos | len | Tm | 5′dG | 3′dG | GCrate | Sequence |
| F3 | 723 | 745 | 23 | 55.61 | -3.03 | -4.01 | 0.30 | TGATATGTATGCTGAAAGGAATT (SEQ ID NO: 1561) |
| B3 | 914 | 933 | 20 | 56.48 | -6.10 | -6.41 | 0.40 | TGCCTCATATTTTAGTGCCA (SEQ ID NO: 1562) |
| FIP | | | 47 | | | | | AGCTCTTTTTGGTATGCTGACTGAA-ATCCAACTTTTCTTGACTTTGC (SEQ ID NO: 1563) |
| BIP | | | 40 | | | | | CAAGGTGGTGGAGTGGTTCTTCCACTACTCTGTCTCTAGC (SEQ ID NO: 1564) |
| F2 | 755 | 776 | 22 | 57.30 | -4.41 | -5.01 | 0.36 | ATCCAACTTTTCTTGACTTTGC (SEQ ID NO: 1565) |
| F1c | 797 | 821 | 25 | 62.81 | -5.32 | -4..41 | 0.40 | AGCTCTTTTTGGTATGCTGACTGAA (SEQ ID NO: 1566) |
| B2 | 877 | 896 | 20 | 56.80 | -5.25 | -4.67 | 0.50 | TCCACTACTCTGTCTCTAGC (SEQ ID NO: 1567) |
| B1c | 833 | 852 | 20 | 61.40 | -5.00 | -4.85 | 0.55 | CAAGGTGGTGGAGTGGTTCT (SEQ ID NO: 1568) |

TABLE 29

LAMP Assay Designs for Primer Group 10
Primer Group 10: TPS19BL - Exon 7 - - gDNA/cDNA LAMP Design -

| 1 | ID:4 | | dimer(minimum)dG=-2.46 | | | | | |
|---|---|---|---|---|---|---|---|---|
| label | 5′pos | 3′pos | len | Tm | 5′dG | 3′dG | GCrate | Sequence |
| F3 | 37 | 54 | 18 | 56.12 | -6.10 | -4.41 | 0.50 | TAGGCGTTGGTTGTGATC (SEQ ID NO: 1569) |
| B3 | 211 | 230 | 20 | 56.55 | -4.46 | -6.54 | 0.45 | ACATGAAGGAATTAGGAGGC (SEQ ID NO: 1570) |
| FIP | | | 47 | | | | | GTTTCCACCACCATTCCTCAAA-TATACATCAAAGGAACTAATCTTGC (SEQ ID NO: 1571) |
| BIP | | | 43 | | | | | TCGAAGTATGCATTCTTTGTTGAGG-AGTGTTGAAGATGCACGT (SEQ ID NO: 1572) |
| F2 | 60 | 84 | 25 | 56.86 | -2.87 | -5.26 | 0.32 | TATACATCAAAGGAACTAATCTTGC (SEQ ID NO: 1573) |
| F1c | 100 | 121 | 22 | 60.84 | -4.62 | -4.02 | 0.45 | GTTTCCACCACCATTCCTCAAA (SEQ ID NO: 1574) |
| B2 | 193 | 210 | 18 | 55.98 | -4.55 | -6.73 | 0.44 | AGTGTTGAAGATGCACGT (SEQ ID NO: 1575) |
| B1c | 130 | 154 | 25 | 61.49 | -5.04 | -4.86 | 0.40 | TCGAAGTATGCATTCTTTGTTGAGG (SEQ ID NO: 1576) |
| LB | 157 | 181 | 25 | 60.57 | -4.86 | -4.13 | 0.40 | CTTCCATGCATCTGAAATCTTTTCC (SEQ ID NO: 1577) |

Primer Group 10: TPS19BL - Exon 7 - - gDNA/cDNA LAMP Design

| ID:1 | | dimer(minimum)dG=-2.44 | | | | | | |
|---|---|---|---|---|---|---|---|---|
| label | 5′pos | 3′pos | len | Tm | 5′dG | 3′dG | GCrate | Sequence |
| F3 | 14 | 34 | 21 | 55.15 | -3.15 | -5.00 | 0.38 | TTGATATGTTCTTCCAAGTGG (SEQ ID NO: 1578) |
| B3 | 185 | 202 | 18 | 55.46 | -5.14 | -4.01 | 0.44 | AGATGCACGTGAGGAAAT (SEQ ID NO: 1579) |
| FIP | | | 42 | | | | | GCTTCTCTCAATCTCGCAAGATTA-GTAGGCGTTGGTTGTGAT (SEQ ID NO: 1580) |
| BIP | | | 41 | | | | | GGAATGGTGGTGGAAACGCT-AAAAGATTTCAGATGCATGGA (SEQ ID NO: 1581) |
| F2 | 36 | 53 | 18 | 56.45 | -5.42 | -4.46 | 0.50 | GTAGGCGTTGGTTGTGAT (SEQ ID NO: 1582) |
| F1c | 76 | 99 | 24 | 60.53 | -5.09 | -2.98 | 0.42 | GCTTCTCTCAATCTCGCAAGATTA (SEQ ID NO: 1583) |
| B2 | 159 | 179 | 21 | 55.46 | -3.52 | -4.91 | 0.33 | AAAAGATTTCAGATGCATGGA (SEQ ID NO: 1584) |
| B1c | 105 | 124 | 20 | 62.64 | -4.51 | -6.07 | 0.55 | GGAATGGTGGTGGAAACGCT (SEQ ID NO: 1585) |
| LB | 130 | 154 | 25 | 61.49 | -5.04 | -4.86 | 0.40 | TCGAAGTATGCATTCTTTGTTGAGG (SEQ ID NO: 1576) |

TABLE 30

LAMP Assay Designs for Primer Groups 7 and 9
Primer Groups 7&9: TPS18Choc/VF - Common - Exon 3 - Linalool Synthase Marker -gDNA/cDNA LAMP Design

| ID:15 | | dimer(minimum)dG=-2.18 | | | | | | |
|---|---|---|---|---|---|---|---|---|
| label | 5′pos | 3′pos | len | Tm | 5′dG | 3′dG | GCrate | Sequence |
| F3 | 6 | 27 | 22 | 55.82 | -3.69 | -4.06 | 0.32 | TTTCAACAAGTACAAGGACAAT (SEQ ID NO: 1586) |
| B3 | 182 | 203 | 22 | 55.50 | -6.10 | -4.73 | 0.36 | GCCTGATATTGATCATAACGAT (SEQ ID NO: 1587) |
| FIP | | | 43 | | | | | TGGGAGGCTTCATATAAGCTCAG-TTGTTTCGACACAAGGCTAA (SEQ ID NO: 1588) |
| BIP | | | 43 | | | | | AGGGAGAAAATATCCTTGATGAAGC-GAAGACGTGTCATGGACG (SEQ ID NO: 1589) |
| F2 | 36 | 55 | 20 | 57.12 | -3.83 | -4.93 | 0.40 | TTGTTTCGACACAAGGCTAA (SEQ ID NO: 1590) |
| F1c | 76 | 98 | 23 | 61.53 | -5.70 | -5.59 | 0.48 | TGGGAGGCTTCATATAAGCTCAG (SEQ ID NO: 1591) |
| B2 | 164 | 181 | 18 | 56.77 | -4.36 | -6.19 | 0.56 | GAAGACGTGTCATGGACG (SEQ ID NO: 1592) |
| B1c | 110 | 134 | 25 | 60.77 | -5.53 | -5.26 | 0.40 | AGGGAGAAAATATCCTTGATGAAGC (SEQ ID NO: 1593) |
| LB | 136 | 160 | 25 | 60.66 | -4.09 | -5.00 | 0.40 | GCTTTATTTAGTGCTCAACACTTGG (SEQ ID NO: 1594) |

### Anti-Insecticidal

[0064] TABLE 31

LAMP Assay Design for Primer Group 15
Primer Group 15: B-Farnescene - CsTPS25LS - Exon 6 - gDNA/cDNA LAMP Design

| 1 | ID:1 | | dimer(minimum)dG=-2.28 | | | | | |
|---|---|---|---|---|---|---|---|---|
| label | 5′pos | 3′pos | len | Tm | 5′dG | 3′dG | GCrate | Sequence |
| F3 | 1 | 23 | 23 | 55.64 | -4.79 | -4.07 | 0.35 | CTTTCGAGAAGCTATATCATTCA (SEQ ID NO: 1595) |
| B3 | 192 | 214 | 23 | 55.88 | -4.18 | -5.37 | 0.30 | GTTGAACCAAAAATATTTCCCAA (SEQ ID NO: 1596) |
| FIP | | | 43 | | | | | CTCTTCAATGGCTCTCCAATGAC-TGTGTCTAGAAAGGAGAGTG (SEQ ID NO: 1597) |
| BIP | | | 44 | | | | | ATCCATTCCAACAAAACTTGTGGC-GCTTGGATGAGCATTTGAGA (SEQ ID NO: 1598) |
| F2 | 24 | 43 | 20 | 55.38 | -5.07 | -4.74 | 0.45 | TGTGTCTAGAAAGGAGAGTG (SEQ ID NO: 1599) |
| F1c | 64 | 86 | 23 | 61.01 | -4.20 | -4.06 | 0.48 | CTCTTCAATGGCTCTCCAATGAC (SEQ ID NO: 1600) |
| B2 | 172 | 191 | 20 | 57.71 | -5.85 | -4.27 | 0.45 | GCTTGGATGAGCATTTGAGA (SEQ ID NO: 1601) |
| B1c | 109 | 132 | 24 | 62.50 | -4.29 | -6.41 | 0.42 | ATCCATTCCAACAAAACTTGTGGC (SEQ ID NO: 1602) |

TABLE 32

LAMP Assay Designs for Primer Group 17
Primer Group 17 - TPS29BC - Linalool Synthase - Exon 3 - gDNA/cDNA LAMP Design

| 1 | ID:26 | | dimer(minimum)dG=-2.18 | | | | | |
|---|---|---|---|---|---|---|---|---|
| label | 5′pos | 3′pos | len | Tm | 5′dG | 3′dG | GCrate | Sequence |
| F3 | 54 | 73 | 20 | 56.08 | -4.98 | -4.01 | 0.40 | GCAGTAACAAGCATGGAATT (SEQ ID NO: 1603) |
| B3 | 220 | 239 | 20 | 56.38 | -4.41 | -4.85 | 0.45 | TCCAATACAGTGGAACTTCC (SEQ ID NO: 1604) |
| FIP | | | 46 | | | | | CTCTTGGCTTCCTCCAAAACATTT-TGAGTTTGTATGAAGCTTCACA (SEQ ID NO: 1605) |
| BIP | | | 41 | | | | | TTCACCACCAAAAGGCTGAG-TGATTGTTTCACTTGCTTACC (SEQ ID NO: 1606) |
| F2 | 75 | 96 | 22 | 57.62 | -4.41 | -4.58 | 0.36 | TGAGTTTGTATGAAGCTTCACA (SEQ ID NO: 1607) |
| F1c | 115 | 138 | 24 | 61.75 | -4.35 | -3.71 | 0.42 | CTCTTGGCTTCCTCCAAAACATTT (SEQ ID NO: 1608) |
| B2 | 197 | 217 | 21 | 56.22 | -4.07 | -4.18 | 0.38 | TGATTGTTTCACTTGCTTACC (SEQ ID NO: 1609) |
| B1c | 140 | 159 | 20 | 60.04 | -5.02 | -5.59 | 0.50 | TTCACCACCAAAAGGCTGAG (SEQ ID NO: 1610) |
| LB | 165 | 189 | 25 | 62.01 | -4.60 | -3.31 | 0.44 | TCTCAGCTGGGAAAATGGATACTAC (SEQ ID NO: 1611) |

Primer Group 17 - TPS29BC - Linalool Synthase - Exon 3 - gDNA/cDNA LAMP Design

| 3 | ID:68 | | dimer(minimum)dG=-2.28 | | | | | |
|---|---|---|---|---|---|---|---|---|
| label | 5′pos | 3′pos | len | Tm | 5′dG | 3′dG | GCrate | Sequence |
| F3 | 106 | 125 | 20 | 55.01 | -6.10 | -4.28 | 0.40 | GCCTGAAGAAAATGTTTTGG (SEQ ID NO: 1612) |
| B3 | 290 | 310 | 21 | 56.15 | -4.16 | -4.76 | 0.43 | CAAAGTCACACTCTTTGTCTC (SEQ ID NO: 1613) |
| FIP | | | 43 | | | | | AGTAGTATCCATTTTCCCAGCTGA-GGAAGCCAAGAGTTTCACC (SEQ ID NO: 1614) |
| BIP | | | 47 | | | | | GAAACAATCACTGGAAGTTCCACT-ATCCATTTGGTAGAGATCAATGA (SEQ ID NO: 1615) |
| F2 | 127 | 145 | 19 | 57.67 | -5.70 | -5.02 | 0.53 | GGAAGCCAAGAGTTTCACC (SEQ ID NO: 1616) |
| F1c | 167 | 190 | 24 | 61.25 | -3.96 | -5.49 | 0.42 | AGTAGTATCCATTTTCCCAGCTGA (SEQ ID NO: 1617) |
| B2 | 267 | 289 | 23 | 57.03 | -4.29 | -4.07 | 0.35 | ATCCATTTGGTAGAGATCAATGA (SEQ ID NO: 1618) |
| B1c | 208 | 231 | 24 | 61.15 | -4.18 | -5.25 | 0.42 | GAAACAATCACTGGAAGTTCCACT (SEQ ID NO: 1619) |
| LB | 237 | 259 | 23 | 64.24 | -5.55 | -5.09 | 0.52 | GGAGGATGCCAAGATCTGAAGCT (SEQ ID NO: 1620) |

TABLE 33

LAMP Assay Designs for Primer Group 18
Primer Group 18 - TPS17AK - Linalool Synthase - Exon 6 - gDNA/cDNA LAMP Design (These Two target the AK-specific Allele on an unplaced scaffold of Cs10, avoiding the 92% related gene on chromosome 5)

| ID:1 | | dimer(minimum)dG=-1.71 | | | | | | |
|---|---|---|---|---|---|---|---|---|
| label | 5′pos | 3′pos | len | Tm | 5′dG | 3′dG | GCrate | Sequence |
| F3 | 1 | 22 | 22 | 56.24 | -6.00 | -4.29 | 0.41 | GTGGGTAGATATGTGTAGATGT (SEQ ID NO: 1621) |
| B3 | 199 | 221 | 23 | 55.76 | -1.98 | -4.34 | 0.30 | TTATTATGGAACTGTGACGAATT (SEQ ID NO: 1622) |
| FIP | | | 47 | | | | | TCCCACTGAAATCCAACCATTTTC-TCTACAAGAAGCAAAATGGTACT (SEQ ID NO: 1623) |
| BIP | | | 48 | | | | | ACCAGTCCTTATTGTGCATGCTT-GATAATAACCATGTTCCAAACATTC (SEQ ID NO: 1624) |
| F2 | 25 | 47 | 23 | 57.62 | -3.99 | -4.57 | 0.35 | TCTACAAGAAGCAAAATGGTACT (SEQ ID NO: 1625) |
| F1c | 83 | 106 | 24 | 61.54 | -5.86 | -3.17 | 0.42 | TCCCACTGAAATCCAACCATTTTC (SEQ ID NO: 1626) |
| B2 | 167 | 191 | 25 | 56.57 | -2.63 | -4.06 | 0.32 | GATAATAACCATGTTCCAAACATTC (SEQ ID NO: 1627) |
| B1c | 109 | 131 | 23 | 62.70 | -5.39 | -4.79 | 0.43 | ACCAGTCCTTATTGTGCATGCTT (SEQ ID NO: 1628) |
| LF | 51 | 75 | 25 | 63.06 | -4.71 | -4.90 | 0.44 | TCTTCCAATGTTGGTGTGTATCCAC (SEQ ID NO: 1629) |

Primer Group 18- TPS17AK - Linalool Synthase - Exon 6 - gDNA/cDNA LAMP Design

| 1 | ID:6 | | dimer(minimum)dG=-2.01 | | | | | |
|---|---|---|---|---|---|---|---|---|
| label | 5′pos | 3′pos | len | Tm | 5′dG | 3′dG | GCrate | Sequence |
| F3 | 12 | 34 | 23 | 55.31 | -4.30 | -4.02 | 0.30 | TGTGTAGATGTTTTCTACAAGAA (SEQ ID NO: 1630) |
| B3 | 199 | 221 | 23 | 55.76 | -1.98 | -4.34 | 0.30 | TTATTATGGAACTGTGACGAATT (SEQ ID NO: 1622) |
| FIP | | | 47 | | | | | TCCCACTGAAATCCAACCATTTTC-CAAAATGGTACTACAGTGGATAC (SEQ ID NO: 1631) |
| BIP | | | 48 | | | | | ACCAGTCCTTATTGTGCATGCTT-GATAATAACCATGTTCCAAACATTC (SEQ ID NO: 1624) |
| F2 | 36 | 58 | 23 | 56.34 | -3.32 | -4.08 | 0.39 | CAAAATGGTACTACAGTGGATAC (SEQ ID NO: 1632) |
| F1c | 83 | 106 | 24 | 61.54 | -5.86 | -3.17 | 0.42 | TCCCACTGAAATCCAACCATTTTC (SEQ ID NO: 1626) |
| B2 | 167 | 191 | 25 | 56.57 | -2.63 | -4.06 | 0.32 | GATAATAACCATGTTCCAAACATTC (SEQ ID NO: 1627) |
| B1c | 109 | 131 | 23 | 62.70 | -5.39 | -4.79 | 0.43 | ACCAGTCCTTATTGTGCATGCTT (SEQ ID NO: 1628) |

TABLE 34

LAMP Assay Designs for Primer Group 19
Primer Group 19 - TPS33PK - Alpha/Gamma-Terpinene Synthase - Exon 7 - gDNA/cDNA LAMP Design

| ID:1 | | dimer(minimum)dG=-2.18 | | | | | | |
|---|---|---|---|---|---|---|---|---|
| label | 5′pos | 3′pos | len | Tm | 5′dG | 3′dG | GCrate | Sequence |
| F3 | 5 | 25 | 21 | 55.16 | -4.71 | -4.90 | 0.38 | GAGGAATTGAAAAGAGGTGAT (SEQ ID NO: 1633) |
| B3 | 170 | 191 | 22 | 57.16 | -4.74 | -4.98 | 0.41 | CCATCTTAGCAAAGTTTGTAGC (SEQ ID NO: 1634) |
| FIP | | | 43 | | | | | GTTCACGAGCTTCTTCTTCAGATCTCCGACATCAATTCAATGT (SEQ ID NO: 1635) |
| BIP | | | 45 | | | | | AATGAAGCATGGAAGGAGATGAAATCTTCAGTCAATGAGATTGGA (SEQ ID NO: 1636) |
| F2 | 27 | 46 | 20 | 55.19 | -5.88 | -4.21 | 0.40 | CTCCGACATCAATTCAATGT (SEQ ID NO: 1637) |
| F1c | 67 | 89 | 23 | 60.32 | -4.67 | -4.15 | 0.43 | GTTCACGAGCTTCTTCTTCAGAT (SEQ ID NO: 1638) |
| B2 | 148 | 169 | 22 | 56.69 | -3.75 | -4.41 | 0.36 | ATCTTCAGTCAATGAGATTGGA (SEQ ID NO: 1639) |
| B1c | 107 | 129 | 23 | 60.03 | -3.57 | -3.92 | 0.39 | AATGAAGCATGGAAGGAGATGAA (SEQ ID NO: 1640) |

TABLE 35

LAMP Assay Designs for Primer Group 16
Primer Group 16 - TPS20LPA005 — Guaiol Synthase - cDNA/gDNA Specific LAMP Primers

| | | | | | | | | |
|---|---|---|---|---|---|---|---|---|
| 1 | ID:10 0 | | dimer(minimum)dG=-2.20 | | | | | |
| label | 5′pos | 3′pos | len | Tm | 5′dG | 3′dG | GCrate | Sequence |
| F3 | 1125 | 1145 | 21 | 55.43 | -5.69 | -5.09 | 0.38 | GGAGGTTATTTTGAAGAAGCT (SEQ ID NO: 1641) |
| B3 | 1326 | 1348 | 23 | 57.12 | -3.74 | -4.27 | 0.39 | CCAATATCATCCATGAACCTAGA (SEQ I D NO: 1642) |
| FIP | | | 49 | | | | | TCAACAAAACGTTACCAGAAGAAACGATGGTTGAATGAAGGATATTTCC (SEQ ID NO: 1643) |
| BIP | | | 46 | | | | | TAGCCACAAGTTTTGTAGGGATGTGAAACAATTTTAGGGTCTTTCG (SEQ ID NO: 1644) |
| F2 | 1147 | 1170 | 24 | 57.49 | -4.90 | -4.01 | 0.38 | GATGGTTGAATGAAGGATATTTCC (SEQ ID NO: 1645) |
| F1c | 1203 | 1227 | 25 | 60.21 | -4.58 | -4.01 | 0.36 | TCAACAAAACGTTACCAGAAGAAAC (SEQ ID NO: 1646) |
| B2 | 1288 | 1310 | 23 | 57.24 | -4.18 | -4.79 | 0.35 | TGAAACAATTTTAGGGTCTTTCG (SEQ ID NO: 1647) |
| B1c | 1228 | 1250 | 23 | 60.43 | -5.33 | -5.35 | 0.43 | TAGCCACAAGTTTTGTAGGGATG (SEQ ID NO: 1648) |
| LF | 1178 | 1201 | 24 | 60.00 | -3.43 | -5.09 | 0.42 | TAAGAGACTCTCAAATGCTCATCG (SEQ ID NO: 1649) |
| LB | 1264 | 1287 | 24 | 60.29 | -4.71 | -5.93 | 0.42 | CACATGAAACTCTAGATTGGCTCT (SEQ ID NO: 1650) |

### Methods of Analyzing the TPS Gene Profile of a Plant Cultivar

[0065] Provided herein are methods and compositions for analyzing the TPS gene profile of a plant cultivar. The analyzing can include, for example, identifying and/or quantitating one or more TPS genes and/or paralogs thereof in a plant cultivar. The methods employ polymerase chain reaction (PCR) primers that are complementary to unique subsequences within each TPS gene that is in the genome of the plant cultivar, wherein hybridization of a subsequence of a TPS gene or paralog thereof to the primers uniquely identifies and/or quantitates the TPS gene or a paralog thereof. A unique subsequence of a TPS gene is a portion of the TPS gene that is different from other subsequences of the TPS gene and is different from subsequences of other TPS genes, thereby permitting identification of each TPS gene in the genome of the plant cultivar, such as a Cannabis genome. The subsequences can be an intron or a portion thereof, an exon or a portion thereof, or any region in-between that is identified as unique compared to other subsequences in the TPS gene and compared to the subsequences in other TPS genes. In embodiments, the subsequences to which the primers can be hybridized are exons, or portions thereof. In certain embodiments, more than one unique subsequence (e.g., exon) of a TPS gene can be analyzed, e.g., 2, 3, 4, 5, 6, 7, 8, 9, 10 or more unique subsequences (e.g., exons) of a TPS gene can be identified and/or quantitated, thereby increasing the accuracy of identifying a particular TPS gene in the genomic profile of a plant cultivar.

[0066] The primers provided herein can be used to amplify TPS genes and/or paralogs thereof prior to input in various common assays for variant identification, including high resolution melting (HRM), quantitative PCR (qPCR), loop-mediated isothermal amplification (LAMP), restriction endonuclease digestion, gel electrophoresis, and/or Sanger/Next-Generation sequencing. For each plant cultivar that is analyzed according to the methods provided herein, a barcode representing each TPS gene and/or paralog thereof that is identified and/or quantitated can be assigned, thereby providing an efficient way to visualize the TPS gene profile of a plant cultivar. The barcode for a given TPS gene can be based, for example, on the number and types of exons that are detected and/or quantified for that TPS gene — each detected exon can be assigned a number, and the total read of all detected exons can constitute a barcode.

### Detection of TPS Genes or Paralogs Thereof

[0067] Provided herein are methods for analyzing nucleic acid from a plant sample. Also provided herein are methods for generating nucleic acid amplification products from a plant sample. Also provided herein are methods for preparing a nucleic acid mixture. A method herein can include contacting nucleic acid of a plant sample with a polynucleotide primer pair under amplification conditions. In embodiments, a method herein includes contacting nucleic acid of a plant sample with one or more polynucleotide primer pairs under amplification conditions. In some embodiments, a method herein comprises contacting nucleic acid of a plant sample with a plurality of polynucleotide primer pairs under amplification conditions. A plurality of primer pairs can include two or more polynucleotide primer pairs, three or more polynucleotide primer pairs, four or more polynucleotide primer pairs, five or more polynucleotide primer pairs, six or more polynucleotide primer pairs, seven or more polynucleotide primer pairs, eight or more polynucleotide primer pairs, nine or more polynucleotide primer pairs, or ten or more polynucleotide primer pairs. Each of the plurality of primer pairs can be used to analyze a sample in a separate reaction container, such as a well. Alternately, if the amplicons expected to be obtained using the plurality of primer pairs are expected to be of different sizes and/or are otherwise distinguishable (e.g., using labeled primers), a plurality of primers can be used to analyze the sample in a single reaction container.

[0068] In certain embodiments, a method includes generating one or more amplification products. Amplification products can be generated by any suitable amplification method described herein or known in the art (e.g., polymerase chain reaction (PCR)). Suitable amplification conditions can include any conditions that can generate an amplification product, when a target nucleic acid, such as a unique subsequence (e.g., exon) of a TPS gene, is contacted with primers that are capable of hybridizing to the target nucleic acid. In embodiments, a method includes generating a mixture (e.g., a mixture of two or more amplification product species). A mixture of two or more amplification product species can be generated when two or more primer pairs hybridize to different regions of a target nucleic acid. Such amplification product species can have different lengths and/or different nucleotide sequences, which can include overlapping and/or non-overlapping sequences.

[0069] Generally, a primer pair includes a forward primer and a reverse primer. Examples of primer pairs that can be used to detect exons in 74 Cannabis sativa TPS genes are set forth in Table B (SEQ ID NOS: 1-1284; 1398 and 1399), in Primer Groups 1-19 as set forth in Tables 1-16 and in B3/F3 polynucleotide primer pairs set forth in Tables 17-35. Two primer pairs can include two different forward primer species (e.g., A-fwd and B-fwd) and two different reverse primer species (e.g., A-rev, B-rev); can include one forward primer species (e.g., A-fwd) and two different reverse primer species (e.g., A-rev, B-rev); or can include two different forward primer species (e.g., A-fwd and B-fwd) and one reverse primer species (e.g., A-rev), provided the combination of forward and reverse primer species is capable of generating two amplification product species. Further forward and reverse primer combinations are contemplated for additional primer pairs. Examples of forward and reverse primer pairing combinations, with the corresponding amplification product species, are provided in Table B and herein, e.g., in in Primer Groups 1-19 as set forth in Tables 1-16 and in B3/F3 polynucleotide primer pairs set forth in Tables 17-35. For example, the size of the product (amplicon) that is amplified by any of the pairs of primers provided herein, including primers prepared by any of the methods provided herein, can be, e.g., about 30, 40, 45, 50, 55, 60, 65, 70, 75, 80, 85, 90, 95, 100, 105, 110, 115, 120, 125, 130, 135, 140, 145, 150, 155, 160, 165, 170, 175, 180, 185, 190, 195, 200, 205, 210, 215, 220, 225, 230, 235, 240, 245, 250, 255, 260, 265, 270, 275, 280, 285, 290 or 295 base pairs, within +/- about 10% of each of the recited sizes of the amplicons. In examples, the size of the product (amplicon) that is amplified by any of the pairs of primers provided herein, including primers prepared by any of the methods provided herein, can be, e.g., about 30, 40, 45, 50, 55, 60, 65, 70, 75, 80, 85, 90, 95, 100, 105, 110, 115, 120, 125, 130, 135, 140, 145, 150, 155, 160, 165, 170, 175, 180, 185, 190, 195, 200, 205, 210, 215, 220, 225, 230, 235, 240, 245, 250, 255, 260, 265, 270, 275, 280, 285, 290, 295, 300, 325, 350, 375, 400, 425, 450, 475, 500, 525, 550, 575, 600, 625, 650, 675, 700, 725, 750, 775, 800, 825, 850, 875, 900, 925, 950, 975, 1000, 1025, 1050, 1075, 1100, 1125, 1150, 1175, 1200, 1225, 1250, 1275, 1300, 1325, 1350, 1375, 1400, 1425, 1450, 1475, 1500, 1525, 1550, 1575, 1600, 1625, 1650, 1675, 1700, 1725, 1750, 1775, 1800, 1825, 1850, 1875, 1900, 1925, 1950, 1975 or 2000 or more base pairs, within +/- about 10%, 15%, 20%, 25% or 30% of each of the recited sizes of the amplicons. For example, the sizes of the primers used to generate the amplicons can be between about 10 bases to about 50 bases, generally between about 12, 13, 14 or 15 bases to about 20, 21, 22, 24, 25, 26, 27, 28, 29, 30, 31, 32, 33, 34 or 35 or more bases, for example between 15 to about 30 bases, such as 15, 16, 17, 18, 19, 20, 21, 22, 23, 24, 25, 26, 27, 28, 29 or 30 bases.

[0070] In certain embodiments, when a plurality of primer pairs is used, either in a single reaction container or in a separate reaction container for each primer pair, a majority of the polynucleotide primer pairs hybridize to subsequences of the TPS genes and/or paralogs thereof of the plant sample. A majority of the polynucleotide primer pairs can refer to greater than 50% of the primer pairs. For example, a majority of the polynucleotide primer pairs can refer to greater than 60% of the primer pairs, greater than 70% of the primer pairs, greater than 80% of the primer pairs, or greater than 90% of the primer pairs. In embodiments, all (e.g., 100%) of the polynucleotide primer pairs hybridize to subsequences of the TPS genes and/or paralogs thereof of a plant sample. In certain embodiments, the primer pairs are selected from among those set forth in Table B, in Primer Groups 1-19 as set forth in Tables 1-16 and in B3/F3 polynucleotide primer pairs set forth in Tables 17-35.

[0071] In certain embodiments, one or more of the unique subsequences to which the polynucleotide primers hybridize can contain one or more variant nucleotide position, such as a substitution, an insertion or a deletion i.e., the methods of analysis provided herein can detect a genetic modification in a TPS gene.

[0072] A unique subsequence of a TPS gene or paralog thereof, to which the primer pairs hybridize, can be referred to as a target sequence. A target sequence generally refers to a unique subsequence, such as an exon, of a TPS gene or paralog thereof, between the two hybridization sites of a corresponding primer pair, and generally does not include the primer hybridization sites themselves. In embodiments, the two primer hybridization sites are conserved sequence regions that flank a diverse sequence, i.e., a unique subsequence of a TPS gene or paralog thereof is diverse and can differ from other subsequences of the TPS gene and of other TPS genes by 1, 2, 3, 4, 5, 6, 7, 8, 9, 10, 11, 12, 13, 14, 15, 16, 17, 18, 19, 20, 21, 22, 23, 24, 25, 26, 27, 28, 29, 30, 31, 32, 33, 34, 35, 36, 37, 38, 39, 40, 41, 42, 43, 44, 45, 46, 47, 48, 49, 50, 51, 52, 53, 54, 55, 56, 57, 58, 59, 60, 61, 62, 63, 64, 65, 66, 67, 68, 69, 70, 71, 72, 73, 74, 75, 76, 77, 78, 79, 80, 81, 82, 83, 84, 85, 86, 87, 88, 89, 90, 91, 92, 93, 94, 95, 96, 97, 98, 99 or 100 or more bases, such as 110, 120, 130, 140 or 150 or more bases. In embodiments, the variant positions described for a target sequence do not include positions in the primer hybridization sites. In certain embodiments, the TPS genes and/or paralogs thereof have an overall sequence identity of percentages from between about 40% to about 90, 91, 92, 93, 94, 95, 96, 97, 98, 99 or 100%, such as at least 41, 42, 43, 44, 45, 46, 47, 48, 49, 50, 51, 52, 53, 54, 55, 56, 57, 58, 59, 60, 61, 62, 63, 64, 65, 66, 67, 68, 69, 70, 71, 72, 73, 74, 75, 76, 77, 78, 79, 80, 81, 82, 83, 84, 85, 86, 87, 88, 89, 90, 91, 92, 93, 94, 95, 96, 97, 98, 99 or 100%.

[0073] In embodiments, one or more plant cultivars are of the family Rosidae. In certain embodiments, the plant sample is from a Cannabis cultivar, and the TPS gene profile is of a Cannabis genome. In aspects, tthe Cannabis cultivar is selected from among one or more of Type 1, Type 2, Type 3, Type 4 and Type 5 cultivars. Examples of Cannabis genomes include, but are not limited to, a Cannabis sativa genome, Cannabis indica genome, or Cannabis ruderalis genome. Examples of Cannabis genomes include CS10 (GENBANK assembly accession: GCA_900626175.1; REFSEQ assembly accession: GCF_900626175.1), Arcata Trainwreck, Grape Stomper, Citrix, Black 84, Headcheese, Red Eye OG, Tahoe OG, Master Kush, Chem 91, Domnesia, Sour Tsunami, Sour Tsunami_x_CK, Tibor_1_2016, 80 E-1, 80 E-2, 80 E-3, Harlox, Saint Jack, Herijuana, Mothers Milk_5, Black Beauty, Sour Diesel, JL_1, JL_2, JL_3, JL_4, JL_5, JL_6, JL_father, BBCC_x_JL_father, JL_mother, JL_mother_p, IdaliaFT_1, Fedora17_6_1, Carmal_1_2016, CS_1_2016, ElCam_1_2016, C3/USO-1, Carmagnola_3, and Merino_S_1.

[0074] A subsequence (e.g., exon) that is non-identical to any subsequence, or complement thereof, in the TPS gene or paralog thereof of a Cannabis genome generally refers to a sequence containing one or more variant nucleotides when compared to any other subsequence, or complement thereof, in the same TPS gene or in other TPS genes of the Cannabis genome. The primers provided herein generally share a high degree of sequence identity to the regions of the subsequence to which they hybridize. In some embodiments, each polynucleotide in each primer pair contains a sequence that is at least about 95% identical to a subsequence, or complement thereof, of a TPS gene in the genome of the plant cultivar. In certain embodiments, each polynucleotide in each primer pair contains a sequence that is 100% identical to a subsequence, or complement thereof, of a TPS gene in the genome of the plant cultivar.

[0075] In some embodiments, a primer provided herein includes a polynucleotide where one or more nucleotide positions contain a nonstandard nucleotide and/or a degenerate nucleotide. A nonstandard nucleotide can be, for example, a non-natural base, a modified base, or a universal base. A universal base is a base capable of indiscriminately base pairing with each of the four standard nucleotide bases: A, C, G and T. Universal bases that may be incorporated into a primer herein include, but are not limited to, inosine, deoxyinosine, 2′-deoxyinosine (dl, dlnosine), nitroindole, 5-nitroindole, and 3-nitropyrrole (e.g., 5′ nitroindole, deoxyinosine, deoxynebularine). A degenerate nucleotide typically refers to a mixture of nucleotides at a given position and may be represented by a letter other than A, T, G or C. For example, a degenerate nucleotide may be represented by R (A or G), Y (C or T), S (G or C), W (A or T), K (G or T), M (A or C), B (C or G or T), D (A or G or T), H (A or C or T), V (A or C or G), or N (any base), for example. Such symbols for degenerate nucleotides are part of the International Union of Pure and Applied Chemistry (IUPAC) standard nomenclature for nucleotide base sequence names and represent degenerate or nonstandard nucleotides that can bind multiple nucleotides. For example, an “M” in a primer or probe would include a mixture of A and C at that position, and thus could bind to either T or G in a complementary DNA strand. An “N” in a primer or probe would include a mixture of A, T, G and C at that position, and thus could bind to any nucleotide at that position in the complementary DNA strand.

### Methods for Analyzing Nucleic Acids

[0076] Provided herein are methods for analyzing nucleic acids. In embodiments, methods herein include analyzing nucleic acid from a plant sample. In certain embodiments, methods provided herein include analyzing nucleic acid from a Cannabis plant sample. In certain embodiments, the methods provided herein include analyzing subsequences of TPS genes and/or paralogs thereof.

[0077] In embodiments, analyzing includes detecting the presence or absence of a TPS gene or a paralog thereof in the genome of a plant cultivar. In certain embodiments, analyzing includes determining the presence or absence of more than one TPS gene or a paralog thereof in the genome of a plant cultivar. In embodiments, analyzing includes determining all the TPS genes and/or paralogs thereof that are present in the genome of a plant cultivar. In certain embodiments (e.g., by analyzing cDNA from the plant sample to detect the presence or absence of TPS genes and/or paralogs thereof), the expression profile of TPS genes and/or paralogs thereof in a plant sample can be analyzed. In embodiments, analyzing includes determining the presence or absence of one or more TPS genes and/or paralogs thereof in genomic DNA from the plant cultivar sample. In embodiments, the plant sample is from a Cannabis plant cultivar. In certain embodiments, the presence or absence of a TPS gene or paralog thereof can be determined based on one or more amplification products generated using one or more primer pairs that specifically amplify unique subsequences of one or more TPS genes or paralogs thereof. In certain embodiments, the presence or absence of a TPS gene or paralog thereof can be determined based on two or more amplification products generated using one or more primer pairs that specifically amplify unique subsequences of one or more TPS genes or paralogs thereof. In embodiments, the presence or absence of a TPS gene or paralog thereof can be determined based on 3, 4, 5, 6, 7, 8, 9, 10, 20, 30, 35, 40, 45, 50, 55, 60, 70, 80, 90, 100, 150, 200, 250, 300, 350, 400, 450, 500, 550, 600 or 650 or more amplification products generated using one or more primer pairs that specifically amplify unique subsequences of one or more TPS genes or paralogs thereof. In certain embodiments, the number of TPS genes and/or paralogs thereof that are detected in the nucleic acid from the plant sample can be 1, 2, 3, 4, 5, 6, 7, 8, 9, 10, 11, 12, 13, 14, 15, 16, 17, 18, 19, 20, 21, 22, 23, 24, 25, 26, 27, 28, 29, 30, 31, 32, 33, 34, 35, 36, 37, 38, 39, 40, 41, 42, 43, 44, 45, 46, 47, 48, 49, 50, 51, 52, 53, 54, 55, 56, 57, 58, 59, 60, 61, 62, 63, 64, 65, 66, 67, 68, 69, 70, 71, 72, 73, 74, 75, 76, 77, 78, 79 or 80 or more genes and/or paralogs. In certain embodiments, the plant cultivar is a Cannabis cultivar.

[0078] In certain embodiments, analyzing includes detecting a variant of a TPS gene or a paralog thereof in the genome of a plant cultivar, when compared to a reference unmodified genome of the plant cultivar. In embodiments, one or more TPS genes and/or paralogs thereof in the TPS gene profile is modified by genetic modification methods to obtain desired terpene, cannabinoid and/or flavonoid production profiles, and the analyzing includes screening to identify whether the genetic modification is in fact present, when compared to a reference unmodified genome of the plant cultivar. For example, based on the analysis of a reference unmodified TPS gene profile, and the terpene (and/or flavonoid and/or cannabinoid) abundance profile that is expected or is obtained for the unmodified TPS gene profile, it may be desirable to genetically modify one or TPS genes and/or paralogs thereof to provide an improved terpene (and/or flavonoid and/or cannabinoid) abundance profile, e.g., to impart improved medicinal properties, or improved resistance to an organism or environment, or improved affinity for an organism or environment. The variant can include, e.g., one or more nucleotide substitutions, insertions, or deletions at one or more variant positions, thereby changing the terpene and/or cannabinoid and/or flavonoid profiles. Methods of genetically modifying nucleic acids are known to those of skill in the art and include, but are not limited to, ZFN (Zinc Finger Nuclease), TALEN (Transcription Activator-Like Effector Nucleases), CRISPR-cas (cas9, cas12, cas13), Cre-Lox, MiRNA, SiRNA, ShRNA or a combination thereof. In certain embodiments, analyzing includes determining a terpene abundance profile, a flavonoid abundance profile, or any combination thereof. Techniques for measuring terpenes include, but are not limited to, gas chromatography with a flame ionization detector (GC-FID), gas chromatography — mass spectrometry (GC-MS) and headspace solid-phase microextraction (HS-SPME) in conjunction with GC-MS. Techniques for measuring flavonoids include, but are not limited to, gas chromatography (GC), gas chromatography — mass spectrometry (GC-MS), HPLC, HPLC-UV and NIR (near infrared reflectance). Techniques for measuring cannabinoids include, but are not limited to, HPLC, ultra-HPLC, HPLC-UV, HPLC-MS, UHPLC-MS, time-of-flight mass spectrometry (TOF-MS), LC-TOF-MS and NIR (near infrared reflectance).

[0079] In embodiments, detecting one or more genetic variations in a TPS gene or paralog thereof includes contacting the nucleic acid of the plant sample with one or more primer pairs as provided herein, under conditions wherein the one or more primer pairs hybridize to the one or more unique subsequences of a TPS gene or paralog thereof, wherein the one or more unique subsequences contain one or more variant nucleotide positions relative to the corresponding wild-type or unmodified subsequence in the plant cultivar. Following hybridization, the amplification conditions can be the same amplification conditions as those used to amplify the corresponding wild-type or unmodified subsequence, or they can be a different set of amplification conditions. In embodiments, a set of primers can be designed to hybridize with greater specificity for the expected genetically modified variant sequence.

[0080] Any suitable method for genotype assessment may be used for detecting a genetic variation in a TPS gene and/or paralog thereof, such as, for example, nucleic acid sequencing (examples of which are described herein) and/or a high-resolution melting (HRM) assay provided herein. Generally, a sequencing process and/or an HRM assay are performed in conjunction with a nucleic acid amplification method described herein (e.g., using the amplification primers provided herein). In certain embodiments, one or more genetic variations can be determined based on the presence and/or absence of amplification products generated using certain amplification primers provided herein.

### Samples

[0081] Provided herein are methods and compositions for processing, preparing, and/or analyzing nucleic acid. Nucleic acid or a nucleic acid mixture used in the methods and compositions described herein can be isolated from a sample (e.g., a test sample) obtained from a plant cultivar. A plant cultivar can be any plant whose genome includes TPS synthase genes and/or that produces terpenes, including for example, angiosperms, any species of woody, ornamental or decorative, crop or cereal, fruit or vegetable, fruit plant or vegetable plant, flower or tree, macroalga or microalga, phytoplankton and photosynthetic algae (e.g., green algae Chlamydomonas reinhardtii). A plant also refers to a unicellular plant (e.g. microalga) and a plurality of plant cells that are largely differentiated into a colony (e.g. volvox) or a structure that is present at any stage of a plant’s development. Such structures include, but are not limited to, a fruit, a flower, a seed, a shoot, a stem, a leaf, a root, plant tissue sand the like. As used herein, the term “plant tissue” includes differentiated and undifferentiated tissues of plants including those present in roots, shoots, leaves, pollen, seeds and tumors, as well as cells in culture (e.g., single cells, protoplasts, embryos, callus, etc.). Plant tissue can be in planta, in organ culture, tissue culture, or cell culture. Any of the foregoing plant cultivars, portions thereof or extracts thereof are contemplated for use in the methods provided herein.

[0082] A nucleic acid sample can be isolated, obtained or prepared from any type of suitable biological (e.g., plant) specimen or sample (e.g., a test sample). A nucleic acid sample can be isolated or obtained from a single plant cell, a plurality of plant cells (e.g., cultured plant cells), plant cell culture media, conditioned plant cell culture media, or plant tissue (e.g., leaves, roots, stems).

[0083] A sample can be heterogeneous. For example, a sample can include more than one cell type and/or one or more nucleic acid species. In embodiments, a sample can include plant nucleic acid from more than one plant cultivar. In embodiments, the more than one plant cultivar providing the nucleic acid belong to the same species, e.g., both can be Cannabis cultivars. In embodiments, a sample can include plant cells and/or nucleic acid from a single plant or can include plant cells and/or nucleic acid from multiple plants.

### Nucleic Acid

[0084] Provided herein are methods and compositions for processing, preparing, and/or analyzing nucleic acid. The terms nucleic acid(s), nucleic acid molecule(s), nucleic acid fragment(s), target nucleic acid(s), nucleic acid template(s), template nucleic acid(s), nucleic acid target(s), target nucleic acid(s), polynucleotide(s), polynucleotide fragment(s), target polynucleotide(s), polynucleotide target(s), and the like may be used interchangeably throughout the disclosure. The terms refer to nucleic acids of any composition from, such as DNA (e.g., complementary DNA (cDNA; synthesized from any RNA or DNA of interest), genomic DNA (gDNA), genomic DNA fragments, mitochondrial DNA (mtDNA), recombinant DNA (e.g., plasmid DNA), and the like), RNA (e.g., message RNA (mRNA), short inhibitory RNA (siRNA), ribosomal RNA (rRNA), transfer RNA (tRNA), microRNA, transacting small interfering RNA (ta-siRNA), natural small interfering RNA (nat-siRNA), small nucleolar RNA (snoRNA), small nuclear RNA (snRNA), long non-coding RNA (IncRNA), non-coding RNA (ncRNA), transfer-messenger RNA (tmRNA), precursor messenger RNA (pre-mRNA), small Cajal body-specific RNA (scaRNA), piwi-interacting RNA (piRNA), endoribonuclease-prepared siRNA (esiRNA), small temporal RNA (stRNA), signal recognition RNA, telomere RNA, and the like), and/or DNA or RNA analogs (e.g., containing base analogs, sugar analogs and/or a non-native backbone and the like), RNA/DNA hybrids and polyamide nucleic acids (PNAs), all of which can be in single- or double-stranded form, and unless otherwise limited, can encompass known analogs of natural nucleotides that can function in a similar manner as naturally occurring nucleotides. The plant nucleic acid analyzed according to the methods provided herein can be from, a plant, a plasmid containing plant nucleic acid, autonomously replicating sequence (ARS), mitochondria, centromere, artificial chromosome, chromosome, or other nucleic acid able to replicate or be replicated in vitro or in a host cell, a cell, a cell nucleus or cytoplasm of a cell in certain embodiments. A template nucleic acid in some embodiments can be from a single chromosome (e.g., a nucleic acid sample may be from one chromosome of a sample obtained from a diploid organism). Unless specifically limited, the term “nucleic acid” includes nucleic acids containing known analogs of natural nucleotides that have similar binding properties as the reference nucleic acid and are metabolized in a manner similar to naturally occurring nucleotides. Unless otherwise indicated, a particular nucleic acid sequence also implicitly encompasses conservatively modified variants thereof (e.g., degenerate codon substitutions), alleles, orthologs, single nucleotide polymorphisms (SNPs), and complementary sequences as well as the sequence explicitly indicated. Specifically, degenerate codon substitutions can be achieved by generating sequences in which the third position of one or more selected (or all) codons is substituted with mixed-base and/or deoxyinosine residues. The term nucleic acid can be used interchangeably herein with locus, gene, cDNA, and mRNA encoded by a gene. The term also can include, as equivalents, derivatives, variants and analogs of RNA or DNA synthesized from nucleotide analogs, single-stranded (“sense” or “antisense,” “plus” strand or “minus” strand, “forward” reading frame or “reverse” reading frame) and double-stranded polynucleotides. The term “gene” also can refer to a section of DNA involved in producing a polypeptide chain, such as an exon or portion thereof; and generally includes regions preceding and following the coding region (leader and trailer) involved in the transcription/translation of the gene product and the regulation of the transcription/translation, as well as intervening sequences (introns) between individual coding regions (exons). A nucleotide or base generally refers to the purine and pyrimidine molecular units of nucleic acid (e.g., adenine (A), thymine (T), guanine (G), and cytosine (C)). For RNA, the base thymine is replaced with uracil. Nucleic acid length or size can be expressed as a number of bases.

[0085] Target nucleic acids, such as a TPS gene or a paralog thereof or a portion thereof containing a unique subsequence, can be any nucleic acids of interest. Nucleic acids can be polymers of any length composed of deoxyribonucleotides (i.e., DNA bases), ribonucleotides (i.e., RNA bases), or combinations thereof, e.g., 10 bases or longer, 20 bases or longer, 50 bases or longer, 100 bases or longer, 200 bases or longer, 300 bases or longer, 400 bases or longer, 500 bases or longer, 1000 bases or longer, 2000 bases or longer, 3000 bases or longer, 4000 bases or longer, 5000 bases or longer. In certain aspects, nucleic acids are polymers composed of deoxyribonucleotides (i.e., DNA bases), ribonucleotides (i.e., RNA bases), or combinations thereof, e.g., 10 bases or less, 20 bases or less, 50 bases or less, 100 bases or less, 200 bases or less, 300 bases or less, 400 bases or less, 500 bases or less, 1000 bases or less, 2000 bases or less, 3000 bases or less, 4000 bases or less, or 5000 bases or less.

[0086] Nucleic acid can be single or double stranded. Single stranded DNA (ssDNA), for example, can be generated by denaturing double stranded DNA by heating or by treatment with alkali, for example. Accordingly, in some embodiments, ssDNA is derived from double-stranded DNA (dsDNA).

[0087] Nucleic acid (e.g., nucleic acid targets, polynucleotides, primers, polynucleotide primers, polynucleotide primer pairs, sequences, and subsequences) as described herein can be complementary to another nucleic acid, hybridize to another nucleic acid, and/or be capable of hybridizing to another nucleic acid. The terms “complementary” or “complementarity” or “hybridization” generally refer to a nucleotide sequence that base-pairs by non-covalent bonds to a region of a nucleic acid (e.g., a primer that hybridizes to a unique subsequence of a TPS gene or a paralog thereof). In the canonical Watson-Crick base pairing, adenine (A) forms a base pair with thymine (T), and guanine (G) pairs with cytosine (C) in DNA. In RNA, thymine (T) is replaced by uracil (U). Thus, A is complementary to T and G is complementary to C. In RNA, A is complementary to U and vice versa. In a DNA-RNA duplex, A (in a DNA strand) is complementary to U (in an RNA strand). Typically, “complementary” or “complementarity” or “hybridize” or “capable of hybridizing” refers to a nucleotide sequence that is at least partially complementary. These terms can also encompass duplexes that are fully complementary such that every nucleotide in one strand is complementary or hybridizes to every nucleotide in the other strand in corresponding positions.

[0088] In certain instances, a nucleotide sequence can be partially complementary to a target, wherein not all nucleotides of, e.g., a primer, are complementary to every nucleotide in the target nucleic acid (unique subsequence, e.g., exon of a TPS synthase gene or paralog thereof) in all the corresponding positions. For example, the primer can be perfectly (i.e., 100%) complementary to a unique subsequence of a TPS synthase gene or paralog thereof, or a primer can share some degree of complementarity to a unique subsequence of a TPS synthase gene or paralog thereof, e.g., 70%, 75%, 85%, 90%, 95%, 99%.

[0089] The percent identity of two nucleotide sequences can be determined by aligning the sequences for optimal comparison purposes (e.g., gaps can be introduced in the sequence of a first sequence for optimal alignment) The nucleotides at corresponding positions are then compared, and the percent identity between the two sequences can be determined as a function of the number of identical positions shared by the sequences (i.e., % identity= # of identical positions/total # of positions×100). When a position in one sequence is occupied by the same nucleotide as the corresponding position in the other sequence, then the molecules are identical at that position.

[0090] In certain embodiments, nucleic acids in a mixture of nucleic acids are analyzed. A mixture of nucleic acids can include two or more nucleic acid species having the same or different nucleotide sequences, different lengths, different origins (e.g., genomic origins, cDNA, cell or tissue origins, sample origins, subject origins, and the like), different amplification products (e.g., amplification products generated from different sets of primer pairs), or combinations thereof. In certain embodiments, a mixture of nucleic acids includes or can generate a plurality of amplification product species generated from different sets of primer pairs (e.g., 2 or more, 3 or more, 4 or more, 5 or more, 6 or more, 7 or more, 8 or more, 9 or more, 10 or more, 11 or more, 12 or more, 13 or more, 14 or more, 15 or more, 16 or more, 17 or more, 18 or more, 19 or more, 20 or more, 25 or more, 30 or more, 35 or more, 40 or more, 45 or more, 50 or more, 55 or more, 60 or more, 65 or more, 70 or more, 75 or more, 80 or more, 85 or more, 90 or more, 95 or more, 100 or more, 150 or more, 200 or more, 250 or more, 300 or more, 350 or more, 400 or more, 450 or more, 500 or more, 550 or more, 600 or more, or 650 or more amplification product species). In embodiments, a mixture of nucleic acids includes single-stranded nucleic acid and double-stranded nucleic acid. In certain embodiments, a mixture of nucleic acids includes DNA and RNA. In certain embodiments, a mixture of nucleic acids includes ribosomal RNA (rRNA) and messenger RNA (mRNA).

[0091] Nucleic acids used in the methods provided herein can contain nucleic acid from one plant sample or from two or more plant samples (e.g., from 1 or more, 2 or more, 3 or more, 4 or more, 5 or more, 6 or more, 7 or more, 8 or more, 9 or more, 10 or more, 11 or more, 12 or more, 13 or more, 14 or more, 15 or more, 16 or more, 17 or more, 18 or more, 19 or more, or 20 or more plant samples).

[0092] Nucleic acid can be derived from one or more plant sources by methods known in the art. Any suitable method can be used for isolating, extracting and/or purifying DNA from a plant sample, non-limiting examples of which include methods of DNA preparation (e.g., described by Sambrook and Russell, Molecular Cloning: A Laboratory Manual 3d ed., 2001), various commercially available reagents or kits, such as DNeasy^{®}, RNeasy^{®}, QlAprep^{®}, QlAquick^{®}, and QlAamp^{®}, nucleic acid isolation/purification kits by Qiagen, Inc. (Germantown, Md); DNAzol^{®}, ChargeSwitch^{®}, Purelink^{®}, GeneCatcher^{®} nucleic acid isolation/purification kits by Life Technologies, Inc. (Carlsbad, CA); NucleoMag^{®}, NucleoSpin^{®}, and NucleoBond^{®} nucleic acid isolation/purification kits by Clontech Laboratories, Inc. (Mountain View, CA), DNA/RNA extraction kits from Zymo Research (e.g., ZYMOBIOMICS DNA Mini Kit, ZYMOBIOMICS DNA/RNA Miniprep Kit, ZYMOCLEAN gel DNA recovery); the like or combinations thereof.

[0093] Nucleic acid can be provided for performing methods described herein with or without processing of the sample(s) containing the nucleic acid. In embodiments, nucleic acid is provided for performing methods provided herein after processing of the sample(s) containing the nucleic acid. For example, a nucleic acid can be extracted, isolated, purified, partially purified and/or amplified from the sample(s). The term “isolated” as used herein refers to nucleic acid removed from its original environment (e.g., the natural environment if it is naturally occurring, or a host cell if expressed exogenously), and thus is altered by human intervention (e.g., “by the hand of man”) from its original environment. The term “isolated nucleic acid” as used herein can refer to a nucleic acid removed from a test subject (e.g., a plant). An isolated nucleic acid can be provided with fewer non-nucleic acid components (e.g., protein, lipid) than the number of components present in a source sample. A composition containing isolated nucleic acid can be about 50% to greater than 99% free of non-nucleic acid components. A composition containing isolated nucleic acid can be about 90%, 91%, 92%, 93%, 94%, 95%, 96%, 97%, 98%, 99% or greater than 99% free of non-nucleic acid components. The term “purified” as used herein can refer to a nucleic acid provided that contains fewer non-nucleic acid components (e.g., protein, lipid, carbohydrate) than the number of non-nucleic acid components present prior to subjecting the nucleic acid to a purification and/or analysis procedure. A composition containing purified nucleic acid may be about 80%, 81%, 82%, 83%, 84%, 85%, 86%, 87%, 88%, 89%, 90%, 91%, 92%, 93%, 94%, 95%, 96%, 97%, 98%, 99% or greater than 99% free of other non-nucleic acid components. The term “purified” as used herein can refer to a nucleic acid provided that contains fewer nucleic acid species than in the sample source from which the nucleic acid is derived. A composition containing purified nucleic acid may be about 90%, 91%, 92%, 93%, 94%, 95%, 96%, 97%, 98%, 99% or greater than 99% free of nucleic acid species other than the plant nucleic acid of interest.

[0094] In certain embodiments, nucleic acid for performing methods provided herein is used without prior processing of the sample(s) containing the nucleic acid. For example, nucleic acid can be analyzed directly from a plant sample without prior extraction, purification, partial purification, and/or amplification.

[0095] Nucleic acid also can be exposed to a process that modifies certain nucleotides in the nucleic acid before being analyzed or prepared according to the methods provided herein. A process that selectively modifies nucleic acid based upon the methylation state of nucleotides therein can be applied to nucleic acid, for example. In addition, conditions such as high temperature, ultraviolet radiation, x-radiation, can induce changes in the sequence of a nucleic acid molecule. Nucleic acid can be provided in any form that is suitable for conducting an analysis (e.g., genotype analysis, sequence analysis).

### Primers

[0096] Primers useful for detection, amplification, quantification, sequencing and/or analysis of nucleic acid are provided. The term “primer” as used herein refers to a nucleic acid that includes a nucleotide sequence capable of hybridizing or annealing to a target nucleic acid, at or near (e.g., adjacent to) a specific region of interest. Primers can allow for specific determination of a target nucleic acid nucleotide sequence or detection of the target nucleic acid (e.g., presence or absence of a sequence), or feature thereof, for example. A primer typically is a synthetic sequence. The term “specific” or “specificity,” as used herein, refers to the binding or hybridization of one molecule to another molecule, such as a primer for a target polynucleotide. That is, “specific” or “specificity” refers to the recognition, contact, and formation of a stable complex between two molecules, as compared to substantially less recognition, contact, or complex formation of either of those two molecules with other molecules. As used herein, the terms “anneal” and “hybridize” refer to the formation of a stable complex between two molecules. The terms “primer,” “polynucleotide,” “oligo,” or “oligonucleotide” are used interchangeably herein, when referring to primers.

[0097] A primer nucleic acid can be designed and synthesized using methods known to those of skill in the art as well as those provided herein. The primers used in the methods provided herein can be of any length suitable for hybridizing to a nucleotide sequence of interest (e.g., where the nucleic acid is in liquid phase or is bound to a solid support) and performing methods of analyses described herein. Primers can be designed based on any target nucleotide sequence, such as a unique subsequence of a TPA gene or a paralog thereof. A primer, in embodiments, can be about 10 to about 100 nucleotides, about 10 to about 70 nucleotides, about 10 to about 50 nucleotides, about 15 to about 30 nucleotides, or about 5, 6, 7, 8, 9, 10, 11, 12, 13, 14, 15, 16, 17, 18, 19, 20, 25, 30, 35, 40, 45, 50, 55, 60, 65, 70, 75, 80, 85, 90, 95 or 100 nucleotides in length. A primer can include naturally occurring and/or non-naturally occurring nucleotides (e.g., labeled nucleotides), or a mixture thereof. Primers suitable for use in the methods provided herein can be synthesized and labeled using known techniques. For example, primers can be chemically synthesized according to the solid phase phosphoramidite triester method first described by Beaucage and Caruthers, Tetrahedron Lett., 22:1859-1862, 1981, using an automated synthesizer, as described in Needham-VanDevanter et al., Nucleic Acids Res. 12:6159-6168, 1984. Purification of primers can be achieved by native acrylamide gel electrophoresis or by anion-exchange high-performance liquid chromatography (HPLC), for example, as described in Pearson and Regnier, J. Chrom., 255:137-149, 1983.

[0098] All or a portion of a primer sequence can be complementary or substantially complementary to a target nucleic acid. As referred to herein, “substantially complementary” with respect to sequences refers to nucleotide sequences that will hybridize with each other. The stringency of the hybridization conditions can be altered to tolerate varying amounts of sequence mismatch. Included are target and primer sequences that are 55% or more, 56% or more, 57% or more, 58% or more, 59% or more, 60% or more, 61% or more, 62% or more, 63% or more, 64% or more, 65% or more, 66% or more, 67% or more, 68% or more, 69% or more, 70% or more, 71% or more, 72% or more, 73% or more, 74% or more, 75% or more, 76% or more, 77% or more, 78% or more, 79% or more, 80% or more, 81% or more, 82% or more, 83% or more, 84% or more, 85% or more, 86% or more, 87% or more, 88% or more, 89% or more, 90% or more, 91% or more, 92% or more, 93% or more, 94% or more, 95% or more, 96% or more, 97% or more, 98% or more or 99% or more complementary to each other.

[0099] Primers that are substantially complimentary to a target nucleic acid sequence are also substantially identical to the compliment of the target nucleic acid sequence. That is, primers are substantially identical to the anti-sense strand of the nucleic acid. As referred to herein, “substantially identical” with respect to sequences refers to nucleotide sequences that are 55% or more, 56% or more, 57% or more, 58% or more, 59% or more, 60% or more, 61% or more, 62% or more, 63% or more, 64% or more, 65% or more, 66% or more, 67% or more, 68% or more, 69% or more, 70% or more, 71% or more, 72% or more, 73% or more, 74% or more, 75% or more, 76% or more, 77% or more, 78% or more, 79% or more, 80% or more, 81% or more, 82% or more, 83% or more, 84% or more, 85% or more, 86% or more, 87% or more, 88% or more, 89% or more, 90% or more, 91% or more, 92% or more, 93% or more, 94% or more, 95% or more, 96% or more, 97% or more, 98% or more or 99% or more identical to each other. One test for determining whether two nucleotide sequences are substantially identical is to determine the percent of identical nucleotide sequences shared.

[0100] Primer sequences and length can affect hybridization to target nucleic acid sequences. Depending on the degree of mismatch between the primer and target nucleic acid, low, medium or high stringency conditions may be used to effect primer/target annealing. s used herein, the term “stringent conditions” refers to conditions for hybridization and washing. Methods for hybridization reaction temperature condition optimization are known, and can be found, e.g., in Current Protocols in Molecular Biology, John Wiley & Sons, N.Y., 6.3.1-6.3.6 (1989). Aqueous and non-aqueous methods are described in the aforementioned reference and either can be used. Non-limiting examples of stringent hybridization conditions include, for example, hybridization in 6X sodium chloride/sodium citrate (SSC) at about 45° C., followed by one or more washes in 0.2X SSC, 0.1% SDS at 50° C. Another example of stringent hybridization conditions includes hybridization in 6X sodium chloride/sodium citrate (SSC) at about 45° C., followed by one or more washes in 0.2X SSC, 0.1% SDS at 55° C. A further example of stringent hybridization conditions includes hybridization in 6X sodium chloride/sodium citrate (SSC) at about 45° C., followed by one or more washes in 0.2X SSC, 0.1% SDS at 60° C. Often, stringent hybridization conditions are hybridization in 6X sodium chloride/sodium citrate (SSC) at about 45° C., followed by one or more washes in 0.2X SSC, 0.1% SDS at 65° C. More often, stringency conditions can include 0.5 M sodium phosphate, 7% SDS at 65° C., followed by one or more washes at 0.2X SSC, 1% SDS at 65° C. Stringent hybridization temperatures also can be altered (generally, lowered) with the addition of certain organic solvents, such as formamide for example. Organic solvents such as formamide can reduce the thermal stability of double-stranded polynucleotides, so that hybridization can be performed at lower temperatures, while still maintaining stringent conditions and extending the useful life of heat labile nucleic acids. Features of primers described herein also can apply to probes such as, for example, the qPCR probes provided herein.

[0101] As used herein, the phrase “hybridizing” or grammatical variations thereof, refers to binding of a first nucleic acid molecule to a second nucleic acid molecule under low, medium or high stringency conditions, or under nucleic acid synthesis conditions. Hybridizing can include instances where a first nucleic acid molecule binds to a second nucleic acid molecule, where the first and second nucleic acid molecules are complementary. As used herein, “specifically hybridizes” refers to preferential hybridization under nucleic acid synthesis conditions of a primer, to a nucleic acid molecule having a sequence complementary to the primer compared to hybridization to a nucleic acid molecule not having a complementary sequence. For example, specific hybridization includes the hybridization of a primer to a target nucleic acid sequence that is complementary to the primer.

[0102] In certain embodiments, primers can include a nucleotide subsequence that is complementary to a solid phase nucleic acid primer hybridization sequence or substantially complementary to a solid phase nucleic acid primer hybridization sequence (e.g., about 75%, 76%, 77%, 78%, 79%, 80%, 81%, 82%, 83%, 84%, 85%, 86%, 87%, 88%, 89%, 90%, 91%, 92%, 93%, 94%, 95%, 96%, 97%, 98%, 99% or greater than 99% identical to the primer hybridization sequence complement when aligned). A primer can contain a nucleotide subsequence not complementary to or not substantially complementary to a solid phase nucleic acid primer hybridization sequence (e.g., a sequence at the 3′ or 5′ end of the nucleotide subsequence in the primer complementary to or substantially complementary to the solid phase primer hybridization sequence, which sequence can hybridize to a unique subsequence in a TPS gene or paralog thereof).

[0103] A primer, in certain embodiments, can contain a modification such as one or more nonstandard nucleotides, non-natural nucleotides, universal bases, degenerate nucleotides, inosines, abasic sites, locked nucleic acids, minor groove binders, duplex stabilizers (e.g., acridine, spermidine), Tm modifiers or any modifier that changes the binding properties of the primers or probes. A primer, in certain embodiments, can contain a detectable molecule or entity (e.g., a fluorophore, radioisotope, colorimetric agent, particle, enzyme, and the like).

[0104] A primer also can refer to a polynucleotide sequence that, when hybridized to a subsequence of a target nucleic acid or another primer, facilitates the detection of a primer, a target nucleic acid or both, as with molecular beacons, for example. The term “molecular beacon,” as used herein, refers to detectable molecule, where the detectable property of the molecule is detectable only under certain specific conditions, thereby enabling it to function as a specific and informative signal. Non-limiting examples of detectable properties are, optical properties, electrical properties, magnetic properties, chemical properties and time or speed through an opening of known size.

### Amplification

[0105] Nucleic acids can be amplified under amplification conditions. The terms “amplify,” “amplification,” “amplification reaction,” “amplifying,” “amplified,” or “amplification conditions” as used herein refer to subjecting a target nucleic acid in a plant sample (e.g., TPS genes or paralogs thereof in a plant cultivar genome, or plant cDNA) to a process that linearly or exponentially generates amplicon nucleic acids having the same or substantially the same nucleotide sequence as the target nucleic acid or a portion thereof. In certain embodiments, the term “amplified” or “amplification” or “amplification conditions” refers to a method that includes a polymerase chain reaction (PCR). Nucleic acid can be amplified using a suitable amplification process. Nucleic acid amplification typically involves enzymatic synthesis of nucleic acid amplicons (copies), which contain a sequence complementary to a nucleotide sequence being amplified.

[0106] In certain embodiments, a limited amplification reaction, also known as pre-amplification, can be performed (e.g., of gDNA). Pre-amplification is a method in which a limited amount of amplification occurs due to a small number of cycles, for example 10 cycles, being performed. Pre-amplification can allow some amplification, but stops amplification prior to the exponential phase, and typically produces about 500 copies of the desired nucleotide sequence(s). Use of pre-amplification can limit inaccuracies associated with depleted reactants in standard PCR reactions, for example, and also can reduce amplification biases due to nucleotide sequence or species abundance of the target. In embodiments, a one-time primer extension can be performed as a prelude to linear or exponential amplification.

[0107] Any suitable amplification technique can be utilized. Amplification methods include, but are not limited to, polymerase chain reaction (PCR); ligation amplification (or ligase chain reaction (LCR)); amplification methods based on the use of Q-beta replicase or template-dependent polymerase (e.g., U.S. Pat. Publication No. US20050287592); helicase-dependent isothermal amplification (Vincent et al., “Helicase-dependent isothermal DNA amplification”. EMBO reports 5 (8): 795-800 (2004)); strand displacement amplification (SDA); thermophilic SDA nucleic acid sequence-based amplification (3SR or NASBA), and transcription-associated amplification (TAA). Non-limiting examples of PCR amplification methods include standard PCR, AFLP-PCR, allele-specific PCR, Alu-PCR, asymmetric PCR, colony PCR, hot start PCR, inverse PCR (IPCR), in situ PCR (ISH), intersequence-specific PCR (ISSR-PCR), long PCR, multiplex PCR, nested PCR, quantitative PCR (qPCR), touchdown PCR, reverse transcriptase PCR (RT-PCR), reverse transcriptase quantitative PCR (RT-qPCR), TAQMAN qPCR, real time PCR, single cell PCR, solid phase PCR, combinations thereof, and the like. Reagents and hardware for conducting PCR are commercially available.

[0108] It is understood by those of skill in the art that modifications to these PCR protocols can be made to achieve the same or similar results. For example, the temperatures for the various steps in the can be modified by between about 1-5° C., or touchdown PCR can be performed, i.e., the annealing temperature is adjusted based on the cycle number.

[0109] A generalized description of an amplification process is as follows. Primers and target nucleic acid are contacted, and complementary sequences hybridize to one another, for example. Primers can hybridize to a target nucleic acid, at or near (e.g., adjacent to, abutting, and the like) a sequence of interest. A reaction mixture, containing components necessary for enzymatic functionality, is added to the primer-target nucleic acid hybrid, and amplification can occur under suitable conditions. Components of an amplification reaction can include, but are not limited to, e.g., primers (e.g., individual primers, primer pairs, a plurality of primer pairs, and the like) a polynucleotide template (e.g., target nucleic acid), polymerase, nucleotides, dNTPs and the like. In embodiments, non-naturally occurring nucleotides or nucleotide analogs, such as analogs containing a detectable label (e.g., fluorescent or colorimetric label), can be used for example.

[0110] Any suitable polymerase can be selected, which can include polymerases for thermocycle amplification (e.g., Taq DNA Polymerase; Q-Bio™ Taq DNA Polymerase (recombinant truncated form of Taq DNA Polymerase lacking 5′-3′exo activity); SurePrime™ Polymerase (chemically modified Taq DNA polymerase for “hot start” PCR); Arrow™ Taq DNA Polymerase (high sensitivity and long template amplification)) and polymerases for thermostable amplification (e.g., RNA polymerase for transcription-mediated amplification (TMA) described at World Wide Web URL “gen-probe.com/pdfs/tma_whiteppr.pdf”). Other enzyme components can be added, such as reverse transcriptase for transcription mediated amplification (TMA) reactions, for example.

[0111] PCR conditions can be dependent upon primer sequences, target abundance, and the desired amount of amplification, and therefore, any suitable PCR protocol may be selected. PCR is typically carried out as an automated process with a thermostable enzyme. In this process, the temperature of the reaction mixture is cycled through a denaturing step, a primer-annealing step, and an extension reaction step automatically. Some PCR protocols also include an activation step and a final extension step. Machines specifically adapted for this purpose are commercially available. A non-limiting example of a PCR protocol that may be suitable for embodiments described herein is as follows: treating the sample at 95° C. for 2 minutes; repeating 40 cycles of 95° C. for 15 seconds and 60° C. for 30 seconds. Additional examples of suitable PCR protocols are provided in the working examples herein. A completed PCR reaction can optionally be kept at 4° C. until further action is desired. Multiple cycles frequently are performed using a commercially available thermal cycler. Suitable isothermal amplification processes also can be applied, in certain embodiments.

[0112] In certain embodiments, an amplification product can include naturally occurring nucleotides, non-naturally occurring nucleotides, nucleotide analogs and the like and combinations of the foregoing. An amplification product often has a nucleotide sequence that is identical to or substantially identical to a sample nucleic acid nucleotide sequence or complement thereof. A “substantially identical” nucleotide sequence in an amplification product will generally have a high degree of sequence identity to the nucleotide sequence species being amplified or complement thereof (e.g., about 75%, 76%, 77%, 78%, 79%, 80%, 81%, 82%, 83%, 84%, 85%, 86%, 87%, 88%, 89%, 90%, 91%, 92%, 93%, 94%, 95%, 96%, 97%, 98%, 99% or greater than 99% sequence identity), and variations sometimes are a result of infidelity of the polymerase used for extension and/or amplification, or additional nucleotide sequence(s) added to the primers used for amplification.

[0113] In embodiments, where a target nucleic acid is RNA, prior to the amplification step, a DNA copy (cDNA) of the RNA transcript of interest may be synthesized. A cDNA can be synthesized by reverse transcription, which can be carried out as a separate step, or in a homogeneous reverse transcription-polymerase chain reaction (RT-PCR), a modification of the polymerase chain reaction for amplifying RNA.

[0114] Amplification also can be accomplished using digital PCR, in certain embodiments. Digital PCR takes advantage of nucleic acid (DNA, cDNA or RNA) amplification on a single molecule level and offers a highly sensitive method for quantifying low copy number nucleic acid. Systems for digital amplification and analysis of nucleic acids are available (e.g., Fluidigm® Corporation).

[0115] Amplification reactions can be performed as individual amplification reactions, where one primer pair is used for each reaction and the presence or absence of one amplification product is detected. In certain embodiments, multiple individual amplification reactions may be performed (i.e., carried out in separate containers) using a different set of primers for each reaction, and the presence or absence of an amplification product is detected for each individual reaction. In embodiments, amplification reactions are performed as multiplex amplification reactions (i.e., a plurality of amplification reactions performed in a single container), where a plurality of primer pairs is used for the multiplex reaction, and the presence or absence of more than one amplification product is detected. Both individual amplification reactions and multiplex amplification reactions are contemplated for the primers provided herein.

[0116] In certain embodiments, a method provided herein includes generating nucleic acid amplification products from a plant sample. Such methods include contacting nucleic acid of a plant sample with a pair of polynucleotide primers under conditions wherein the pair of polynucleotide primers hybridize to and amplify a unique subsequence, when present, in a TPS gene or a paralog thereof in the genome (or cDNA, e.g., for obtaining an expression profile) of a plant cultivar.

### Quantitative PCR

[0117] In certain embodiments, an amplification method includes a quantifiable amplification method. For example, levels of expression of a TPS synthase gene or a paralog thereof can be measured using a quantitative PCR (qPCR) approach (e.g., on cDNA generated from RNA from a plant sample), or a reverse transcriptase quantitative PCR (RT-qPCR) approach (e.g., on RNA from a plant sample). Quantitative PCR (qPCR), which also can be referred to a real-time PCR, monitors the amplification of a targeted nucleic acid molecule during a PCR reaction (i.e., in real time). This method can be used quantitatively (quantitative real-time PCR) and semi-quantitatively (i.e., above/below a certain amount of nucleic acid molecules; semi-quantitative real-time PCR). The primers can be gene-specific probes that quantitate each amplicon (i.e., individual TPS genes), or they can be class-specific probes, e.g., to quantitate all monoterpene synthases, all diterpene synthases, all sesquiterpene synthases or combinations thereof in the TPS gene profile of the plant cultivar.

[0118] Methods for qPCR include use of non-specific fluorescent dyes that intercalate with double-stranded DNA, and sequence-specific DNA probes labelled with a fluorescent reporter, which generally allows detection after hybridization of the probe with its complementary sequence. Quantitative PCR methods typically are performed in a thermal cycler with the capacity to illuminate each sample with a beam of light of at least one specified wavelength and detect the fluorescence emitted by an excited fluorophore.

[0119] For non-specific detection, a DNA-binding dye can bind to all double-stranded (ds) DNA during PCR. An increase in DNA product during PCR therefore leads to an increase in fluorescence intensity measured at each cycle. For qPCR using dsDNA dyes, the reaction typically is prepared like a basic PCR reaction, with the addition of fluorescent dsDNA dye. Then the reaction is run in a real-time PCR instrument, and after each cycle, the intensity of fluorescence is measured with a detector (the dye only fluoresces when bound to the dsDNA (i.e., the PCR product)). In certain applications, multiple target sequences can be monitored in a tube by using different types of dyes. For specific detection, fluorescent reporter probes detect only the DNA containing the sequence complementary to the probe. Accordingly, use of the reporter probe can, in embodiments, increase specificity and facilitate performing the technique even in the presence of other dsDNA. Using different types of labels, fluorescent probes can be used in multiplex assays for monitoring several target sequences in the same tube. This method typically uses a DNA-based probe with a fluorescent reporter at one end and a quencher of fluorescence at the opposite end of the probe. The close proximity of the reporter to the quencher prevents detection of its fluorescence. During PCR, the probe is broken down by the 5′ to 3′ exonuclease activity of the polymerase, which breaks the reporter-quencher proximity and thus permits unquenched emission of fluorescence, which can be detected after excitation with a laser. An increase in the product targeted by the reporter probe at each PCR cycle therefore causes a proportional increase in fluorescence due to the breakdown of the probe and release of the reporter.

[0120] In certain embodiments, a method provided herein includes contacting nucleic acid of a plant sample with one or more primer pairs and one or more quantitative PCR probes. For example, certain primers provided herein (e.g., primers provided in Table B, in Primer Groups 1-19 as set forth in Tables 1-16 and in B3/F3 polynucleotide primer pairs set forth in Tables 17-35) can be used in combination with certain qPCR probes.

### Loop Mediated Isothermal Amplification (LAMP)

[0121] In certain embodiments, an amplification method includes loop mediated isothermal amplification (LAMP). Loop-mediated isothermal amplification (LAMP) is a single-tube technique useful for nucleic acid amplification. Reverse transcription loop-mediated isothermal amplification (RT-LAMP) combines LAMP with a reverse transcription step for the detection of RNA. LAMP is typically performed under isothermal conditions. In contrast to a polymerase chain reaction (PCR) technology, which is typically performed using a series of alternating temperature cycles, isothermal amplification is performed at a constant temperature, and does not require a thermal cycler.

[0122] In LAMP, a target sequence is amplified at a constant temperature (e.g., between about 60° C. to about 65° C.) using a plurality of primer pairs (e.g., two primer pairs, three primer pairs) and a polymerase (e.g., a polymerase with high strand displacement activity). In certain applications, four different primers can be used to amplify six distinct regions on a target sequence, for example, which can increase specificity. An additional pair of loop primers can further accelerate the reaction.

[0123] The amplification product can be detected via photometry (i.e., measuring the turbidity caused by magnesium pyrophosphate precipitate in solution as a byproduct of amplification). This generally allows for visualization by the naked eye or by photometric detection approaches (e.g., for small volumes). In certain applications, the reaction can be followed in real-time either by measuring turbidity or by fluorescence using intercalating dyes (e.g., SYTO 9, SYBR green). Certain dyes can be used to create a visible color change that can be seen with the naked eye without the need for specialized equipment. Dye molecules intercalate or directly label the DNA, and in turn can be correlated with the number of copies initially present. Accordingly, certain variations of LAMP can be quantitative. Detection of LAMP amplification products also can be achieved using manganese loaded calcein, which starts fluorescing upon complexation of manganese by pyrophosphate during in vitro DNA synthesis. Another method for visual detection of LAMP amplification products by the naked eye is based on the ability of the products to hybridize with complementary gold-bound single-stranded DNA, which prevents a red to purple-blue color change that would otherwise occur during salt-induced aggregation of the gold particles.

[0124] A number of LAMP visualization technologies are known to those of skill in the art (see, e.g., Fischbach et al., Biotechniques, 58(4):189-194 (2015), the contents of which are incorporated in their entirety by reference herein). Examples of such visualization reagents, summarized in the Table below from Fischbach et al., include magnesium pyrophosphate, hydroxynaphthol blue (HNB), calcein, SYBR Green I, EvaGreen and the nucleic acid-specific dye, berberine, which emits a fluorescent signal under UV light after a positive LAMP reaction.

| | | | | | | |
|---|---|---|---|---|---|---|
| | Turbidity | Hydroxynaphthol blue | Calcein | SYBR Green I | EvaGreen | Berberine |
| Substance | Mg-pyrophosphate (Mg-PPi) | Hydroxynaphthol blue (HNB) | Calcein AM + MnCl₂ | SYBR Green I | EvaGreen | Berberine-SO₄ |
| Origin | Amplification product | Synthetic | Synthetic | Synthetic | Synthetic | Natural |
| Toxicity | None | May cause eye irritation | May be harmful to skin and eyes | Mutation enhancer | Possible carcinogen | May be toxic in high concentrations |
| Detection Mechanism | Insoluble complex; precipitation | Decrease of free Mg²⁺ | Decrease of free Mn²⁺ | dsDNA intercalation | dsDNA intercalation | Small groove intercalation |
| Readout | Turbidity Absorbance: 400 nm | Absorption Absorbance: 650 nm | Fluorescence Excitation: 495 nm Emission: 515 nm | Fluorescence Excitation: 494 nm Emission: 521 nm | Fluorescence Excitation: 500 nm Emission: 530 nm | Fluorescence Excitation: 450 nm Emission: 530 nm |
| Effect on amplification | None | None | Manganese may inhibit reaction | Not inhibiting when used 0.5-1x | Not inhibiting when used 0.5-1x | Not inhibiting (≤180 µM) |
| One-pot real-time assay | ++ | - | +++ | ++++ | ++++ | ++++ |
| Equipment for real-time detection | Turbidometer | - | Fluorometer with FAM filter | Fluorometer with FAM filter | Fluorometer with FAM filter | Fluorometer with FAM filter |
| One-pot end point assay | +++ | ++++ | ++++ | - | - | +++ (UV light with low background signal) |
| Equipment for end point detection | None (cordless centrifuge) | None | UV lamp (optional) | Not applicable | Not applicable | UV lamp |
| Evaluation of results | + Turbid - Clear | + Sky blue - Violet | + Green - Orange | + Fluorescence signal - No signal | + Fluorescence signal - No signal | + Fluorescence signal - No signal |
| Percentage of overall costs * | 0 | <0.1 | <0.1 | 26.01 | 1.18 | 0.82 |
| Relative sensitivity ** | +++ | +++ | +++ | +++ | +++ | +++ |
| Field applicability *** | +++ | ++++ | ++++ | ++ | ++ | ++++ |

Summary of features relevant for in-the-field loop-mediated isothermal amplification (LAMP) assays tested for detection of potato spindle tuber viroid (PSTVd).
Number of “+” describes the applicability/relevance of the feature.
* Overall costs represent the basic chemicals of common suppliers for one LAMP reaction, depending on reaction volume.
** In our assays. Analytical sensitivity may depend on LAMP setup and has to be optimized separately.
*** Depending on visualization.

[0125] In embodiments, a method herein includes contacting nucleic acid of a plant sample with a set of loop mediated isothermal amplification (LAMP) primers. For example, Cannabis plant cultivars, or offspring thereof, containing particular TPS genes can be identified via a LAMP assay. In aspects, the LAMP assay can be a colorimetric assay. Examples of LAMP primer sets that can be used to identify Cannabis plant cultivars, or offspring thereof, containing a terpinolene producing TPS gene (csTPS37FN) are shown in Table C below:

TABLE 5

5 LAMP primer sets for Terpinolene-producing gene, csTPS37FN

| Set 1 | | 1381-2005 | dimer(minimum) dG=-2.36 | | | | | |
|---|---|---|---|---|---|---|---|---|
| label | 5′pos | 3′pos | len | Tm | 5′dG | 3′dG | GC rate | Sequence (SEQ ID NO) |
| F3 | 134 | 151 | 18 | 57.55 | -4.41 | -4.16 | 0.5 | TCAGTTGGGGGACCAATT (1285) |
| B3 | 332 | 350 | 19 | 56.29 | -5.68 | -4.27 | 0.53 | CATCCGACGATGTTCCTAG (1286) |
| FIP | | | 47 | | | | | GGATCATCATAACCTTCTTCCAAGA-TCTTTTGCATGCTTATTTTGCT (1287) |
| BIP | | | 47 | | | | | TGAAGGATCCCTGGAAATATCAAAT-TCTTCAAGTCGTAAAAGTATGG (1288) |
| F2 | 154 | 175 | 22 | 57.4 | -3.52 | -4.91 | 0.32 | TCTTTTGCATGCTTATTTTGCT (1289) |
| F1c | 210 | 234 | 25 | 60.23 | -4.76 | -4.86 | 0.4 | GGATCATCATAACCTTCTTCCAAGA (1290) |
| B2 | 306 | 327 | 22 | 55.41 | -4.27 | -4.23 | 0.36 | TCTTCAAGTCGTAAAAGTATGG (1291) |
| B1c | 250 | 274 | 25 | 60.09 | -4.86 | -3.57 | 0.36 | TGAAGGATCCCTGGAAATATCAAAT (1292) |
| LF | 178 | 202 | 25 | 60.48 | -5.7 | -4.33 | 0.4 | GGAAGCTTTTTCTAAGGGATTTGTG (1293) |
| F3 | 233 | 257 | 25 | 56.76 | -5.3 | -4.24 | 0.32 | CCTTCCATAAATATTCATGAAGGAT (1294) |
| B3 | 425 | 442 | 18 | 55.77 | -2.39 | -7.2 | 0.44 | AAATTTGATGTGCTCGCG (1295) |
| FIP | | | 47 | | | | | TCAAGTCGTAAAAGTATGGATCCAA-CCTGGAAATATCAAATGATGGT (1296) |
| BIP | | | 43 | | | | | CTAGGAACATCGTCGGATGAGA-CAGAAACACCTGTATCATTCA (1297) |
| F2 | 259 | 280 | 22 | 55.91 | -5.7 | -4.9 | 0.36 | CCTGGAAATATCAAATGATGGT (1298) |
| F1c | 300 | 324 | 25 | 60.07 | -4.41 | -4.41 | 0.36 | TCAAGTCGTAAAAGTATGGATCCAA (1299) |
| B2 | 393 | 413 | 21 | 55.12 | -4.02 | -4.07 | 0.38 | CAGAAACACCTGTATCATTCA (1300) |
| B1c | 332 | 353 | 22 | 60.75 | -4.27 | -4.15 | 0.5 | CTAGGAACATCGTCGGATGAGA (1301) |
| LB | 359 | 383 | 25 | 60.89 | -4.94 | -3.67 | 0.4 | AGAGGAGATGTTCCGAAATCAATTC (1302) |
| F3 | 210 | 231 | 22 | 56.36 | -4.86 | -4.32 | 0.36 | TCTTGGAAGAAGGTTATGATGA (1303) |
| B3 | 425 | 442 | 18 | 55.77 | -2.39 | -7.2 | 0.44 | AAATTTGATGTGCTCGCG (1304) |
| FIP | | | 48 | | | | | TCAAGTCGTAAAAGTATGGATCCAA-TAAATATTCATGAAGGATCCCTG (1305) |
| BIP | | | 43 | | | | | CTAGGAACATCGTCGGATGAGA-CAGAAACACCTGTATCATTCA (1306) |
| F2 | 240 | 262 | 23 | 55.42 | -1.98 | -5.7 | 0.35 | TAAATATTCATGAAGGATCCCTG (1307) |
| F1c | 300 | 324 | 25 | 60.07 | -4.41 | -4.41 | 0.36 | TCAAGTCGTAAAAGTATGGATCCAA (1308) |
| B2 | 393 | 413 | 21 | 55.12 | -4.02 | -4.07 | 0.38 | CAGAAACACCTGTATCATTCA (1309) |
| B1c | 332 | 353 | 22 | 60.75 | -4.27 | -4.15 | 0.5 | CTAGGAACATCGTCGGATGAGA (1310) |
| LB | 359 | 383 | 25 | 60.89 | -4.94 | -3.67 | 0.4 | AGAGGAGATGTTCCGAAATCAATTC (1311) |
| F3 | | 21 | 21 | 56.35 | -6.3 | -5.08 | 0.38 | GGGACCAATTATTCTTTTGCA (1312) |
| B3 | 191 | 209 | 19 | 56.29 | -5.68 | -4.27 | 0.53 | CATCCGACGATGTTCCTAG (1313) |
| FIP | | | 48 | | | | | GGATCATCATAACCTTCTTCCAAGA-GCTTATTTTGCTTTCACAAATCC (1314) |
| BIP | | | 47 | | | | | ATGAAGGATCCCTGGAAATATCAAA-TCTTCAAGTCGTAAAAGTATGG (1315) |
| F2 | 23 | 45 | 23 | 57.04 | -3.97 | -4.01 | 0.35 | GCTTATTTTGCTTTCACAAATCC (1316) |
| F1c | 69 | 93 | 25 | 60.23 | -4.76 | -4.86 | 0.4 | GGATCATCATAACCTTCTTCCAAGA (1317) |
| B2 | 165 | 186 | 22 | 55.41 | -4.27 | -4.23 | 0.36 | TCTTCAAGTCGTAAAAGTATGG (1318) |
| B1c | 108 | 132 | 25 | 60.09 | -3.9 | -3.57 | 0.36 | ATGAAGGATCCCTGGAAATATCAAA (1319) |
| F3 | 38 | 58 | 21 | 55.06 | -3.71 | -4.74 | 0.33 | ACAAATCCCTTAGAAAAAGCT (1320) |
| B3 | 206 | 227 | 22 | 55.62 | -4.25 | -4.25 | 0.41 | CATCTCCTCTTTTCATCTCATC (1321) |
| FIP | | | 49 | | | | | TTCCAGGGATCCTTCATGAATATTT-CCATAAAATTCTTGGAAGAAGGTT (1322) |
| BIP | | | 44 | | | | | ACCCTACCATATTTCATCTTGGATC-CGACGATGTTCCTAGGTCA (1323) |
| F2 | 60 | 83 | 24 | 57.31 | -3.74 | -4.5 | 0.33 | CCATAAAATTCTTGGAAGAAGGTT (1324) |
| F1c | 100 | 124 | 25 | 60.09 | -4.86 | -2.28 | 0.36 | TTCCAGGGATCCTTCATGAATATTT (1325) |
| B2 | 187 | 205 | 19 | 57.8 | -6.37 | -5.25 | 0.53 | CGACGATGTTCCTAGGTCA (1326) |
| B1c | 141 | 165 | 25 | 60.11 | -4.92 | -4.76 | 0.4 | ACCCTACCATATTTCATCTTGGATC (1327) |

### Detection of Amplification Products

[0126] Amplification products generated by a method provided herein can be detected by a suitable detection process. Non-limiting examples of methods of detection include electrophoresis, nucleic acid sequencing, mass spectrometry, mass detection of mass modified amplicons (e.g., matrix-assisted laser desorption ionization (MALDI) mass spectrometry and electrospray (ES) mass spectrometry), a primer extension method (e.g., iPLEX™; Sequenom, Inc.), Molecular Inversion Probe (MIP) technology from Affymetrix, restriction fragment length polymorphism (RFLP analysis), allele specific oligonucleotide (ASO) analysis, methylation-specific PCR (MSPCR), pyrosequencing analysis, acycloprime analysis, Reverse dot blot, GeneChip microarrays, Dynamic allele-specific hybridization (DASH), Peptide nucleic acid (PNA) and locked nucleic acids (LNA) probes, TaqMan, Molecular Beacons, Intercalating dye, FRET primers, AlphaScreen, SNPstream, genetic bit analysis (GBA), Multiplex minisequencing, SNaPshot, GOOD assay, Microarray miniseq, arrayed primer extension (APEX), Microarray primer extension, Tag arrays, coded microspheres, template-directed incorporation (TDI), fluorescence polarization, colorimetric oligonucleotide ligation assay (OLA), sequence-coded OLA, microarray ligation, ligase chain reaction, padlock probes, invader assay, hybridization using at least one probe, hybridization using at least one fluorescently labeled probe, cloning and sequencing, the use of hybridization probes and quantitative real time polymerase chain reaction (QRT-PCR), digital PCR, nanopore sequencing, chips, and combinations thereof.

[0127] In certain embodiments, amplification products are detected using electrophoresis. Any suitable electrophoresis method, whereby amplified nucleic acids are separated by size, can be used in conjunction with the methods provided herein, which include, but are not limited to, standard electrophoretic techniques and specialized electrophoretic techniques, such as, for example capillary electrophoresis (e.g., Capillary Zone Electrophoresis (CZE), also known as free-solution CE (FSCE), Capillary Isoelectric Focusing (CIEF), Isotachophoresis (ITP), Electrokinetic Chromatography (EKC), Micellar Electrokinetic Capillary Chromatography (MECC OR MEKC), Micro Emulsion Electrokinetic Chromatography (MEEKC), Non-Aqueous Capillary Electrophoresis (NACE), and Capillary Electrochromatography (CEC)).

[0128] Non-limiting standard electrophoresis example is presented as follows. After running an amplified nucleic acid sample in an agarose or polyacrylamide gel, the gel can be labeled (e.g., stained) with ethidium bromide (see, Sambrook and Russell, Molecular Cloning: A Laboratory Manual 3d ed., 2001). The presence of a band of the same size as the standard control is an indication of the presence of a target nucleic acid sequence, the amount of which can then be compared to the control based on the intensity of the band, thus detecting and quantifying the target sequence of interest. In embodiments, where a plurality of primer pairs is used in an amplification reaction, multiple amplification products of varying size can be detected using electrophoresis.

### High Resolution Melting (HRM)

[0129] In certain embodiments, nucleic acid is analyzed in the methods provided herein using a high-resolution melting (HRM) endpoint assay. In embodiments, an analysis includes performing a high-resolution melting (HRM) endpoint assay on amplification products (e.g., amplification products generated using primers provided herein). In embodiments, an analysis includes performing a high-resolution melting (HRM) endpoint assay on nucleic acid in a mixture (e.g., a mixture of amplification products generated using a plurality of primer pairs).

[0130] High resolution melt or high-resolution melting (HRM) analysis is a technique useful for the detection of mutations, polymorphisms, and epigenetic differences in double-stranded DNA. Typically, amplification (e.g., a polymerase chain reaction (PCR)) is performed prior to HRM analysis to amplify a DNA region in which a mutation or other variant of interest is located. The HRM process involves a precise warming of the amplification product from around 50° C. up to around 95° C. At some point during this process, the melting temperature of the amplicon is reached and the two strands of DNA separate (i.e., melt apart).

[0131] The separation of strands can be monitored in real-time (e.g., using a fluorescent dye). Dyes that can be used for HRM include intercalating dyes, which specifically bind to double-stranded DNA and emit fluorescence when bound to DNA. At the start of an HRM analysis there is a high level of fluorescence in the sample because of the billions of copies of the amplicon. However, as the sample is heated up and the two strands of the DNA melt apart, presence of double stranded DNA decreases, and thus the fluorescence is reduced. In certain configurations, an HRM machine has a camera that monitors this process by measuring the fluorescence. The machine can plot the data (e.g., as a graph sometimes referred to as a melt curve), showing the level of fluorescence vs. temperature.

[0132] The melting temperature of an amplification product at which the two DNA strands come apart is a predictable parameter, and typically is dependent on the DNA sequence of the amplicon. When comparing two samples from two different plants containing the same TPS gene, for example, amplification products from both samples should have the same shaped melt curve. However, if one of the plants contains a TPS gene variant, this will alter the temperature at which the DNA strands melt apart. Accordingly, the two melt curves will be different. The difference can be subtle, but because HRM machines typically are capable of monitoring the HRM process in high resolution, it generally is possible to accurately document these changes and therefore identify if a mutation or variant is present or absent.

[0133] In certain embodiments, an analysis includes detecting one or more genetic variations (e.g., single nucleotide substitutions) in a TPS gene or paralog thereof according to results obtained from a high-resolution melting (HRM) endpoint assay. In embodiments, an analysis includes detecting two or more genetic variations (e.g., single nucleotide substitutions) in a in a TPS gene or paralog thereof, according to results obtained from a high-resolution melting (HRM) endpoint assay. In certain embodiments, an analysis includes detecting three or more genetic variations (e.g., single nucleotide substitutions) in a TPS gene or paralog thereof, according to results obtained from a high-resolution melting (HRM) endpoint assay. In certain embodiments, an analysis includes detecting four or more genetic variations (e.g., single nucleotide substitutions) in a TPS gene or paralog thereof, according to results obtained from a high-resolution melting (HRM) endpoint assay. In certain embodiments, an analysis includes detecting five or more genetic variations (e.g., single nucleotide substitutions) in a TPS gene or paralog thereof, according to results obtained from a high-resolution melting (HRM) endpoint assay. In certain embodiments, an analysis includes detecting six or more genetic variations (e.g., single nucleotide substitutions) in a TPS gene or paralog thereof, according to results obtained from a high-resolution melting (HRM) endpoint assay. In certain embodiments, an analysis includes detecting seven or more genetic variations (e.g., single nucleotide substitutions) in a TPS gene or paralog thereof, according to results obtained from a high-resolution melting (HRM) endpoint assay. In certain embodiments, an analysis includes detecting eight or more genetic variations (e.g., single nucleotide substitutions) in a TPS gene or paralog thereof, according to results obtained from a high-resolution melting (HRM) endpoint assay. In certain embodiments, an analysis includes detecting nine or more genetic variations (e.g., single nucleotide substitutions) in a TPS gene or paralog thereof, according to results obtained from a high-resolution melting (HRM) endpoint assay. In certain embodiments, an analysis includes detecting ten or more genetic variations (e.g., single nucleotide substitutions) in a TPS gene or paralog thereof, according to results obtained from a high-resolution melting (HRM) endpoint assay.

### Nucleic Acid Sequencing

[0134] In certain embodiments of the methods provided herein, the nucleic acid is sequenced. In embodiments, amplified subsequences of a TPS gene or a paralog thereof are sequenced by a sequencing process. In embodiments, the sequencing process generates sequence reads (or sequencing reads). In certain embodiments, a method herein comprises determining the sequence of a unique subsequence, such as an exon or a portion thereof, of a TPS gene or a paralog thereof, based on the sequence reads. In certain embodiments, a method provided herein includes determining the TPS gene profile, and/or the TPS gene expression profile, of a plant cultivar based on the sequence reads. In embodiments, the methods provided herein include determining one or TPS gene profiles of one or more plant cultivars based on the sequence reads.

[0135] Nucleic acid can be sequenced using any suitable sequencing platform, non-limiting examples of which include Maxim & Gilbert, chain-termination methods, sequencing by synthesis, sequencing by ligation, sequencing by mass spectrometry, microscopy-based techniques, the like or combinations thereof. In some embodiments, a first-generation technology, such as, for example, Sanger sequencing methods including automated Sanger sequencing methods, including microfluidic Sanger sequencing, can be used in a method provided herein. In some embodiments, sequencing technologies that include the use of nucleic acid imaging technologies (e.g., transmission electron microscopy (TEM) and atomic force microscopy (AFM)), can be used. In embodiments, a high-throughput sequencing method can be used. High-throughput sequencing methods generally involve clonally amplified DNA templates or single DNA molecules that are sequenced in a massively parallel fashion, sometimes within a flow cell. Next generation (e.g., 2nd and 3rd generation) sequencing techniques capable of sequencing DNA in a massively parallel fashion can be used for methods described herein and are collectively referred to herein as “massively parallel sequencing” (MPS). In embodiments, MPS sequencing methods utilize a targeted approach, where specific chromosomes, genes or regions of interest are sequenced. For example, a targeted approach can include targeting specific TPS genes, or specific unique subsequences of a TPS gene, for sequencing. In certain embodiments, a non-targeted approach is used where most or all nucleic acids in a sample are sequenced, amplified and/or captured randomly.

[0136] Non-limiting examples of sequencing platforms include a sequencing platform provided by Illumina® (e.g., HiSeq™, HiSeq™ 2000, MiSeq™, Genome Analyzer™, and Genome Analyzer™ II sequencing systems); Oxford Nanopore™ Technologies (e.g., MinION sequencing system), Ion Torrent™ (e.g., Ion PGM™ and/or Ion Proton™ sequencing systems); Pacific Biosciences (e.g., PACBIO RS II sequencing system); Life Technologies™ (e.g., SOLiD sequencing system); Roche (e.g., 454 GS FLX+ and/or GS Junior sequencing systems); Helicos True Single Molecule Sequencing; Ion semiconductor-based sequencing (e.g., as developed by Life Technologies), WildFire, 5500, 5500xl W and/or 5500xl W Genetic Analyzer based technologies (e.g., as developed and sold by Life Technologies, U.S. Pat. Application Publication No. 2013/0012399); Polony sequencing, Pyrosequencing, Massively Parallel Signature Sequencing (MPSS), RNA polymerase (RNAP) sequencing, LaserGen systems and methods, Nanopore-based platforms, chemical-sensitive field effect transistor (CHEMFET) array, electron microscopy-based sequencing (e.g., as developed by ZS Genetics, Halcyon Molecular), nanoball sequencing; or any other suitable sequencing platform. Other sequencing methods that can be used to conduct methods herein include digital PCR, sequencing by hybridization, nanopore sequencing, chromosome-specific sequencing (e.g., using DANSR (digital analysis of selected regions) technology).

[0137] In certain embodiments, the sequencing process is a highly multiplexed sequencing process. In certain instances, a full or substantially full sequence is obtained and sometimes a partial sequence is obtained. Nucleic acid sequencing generally produces a collection of sequence reads. As used herein, “reads” (e.g., “a read,” “a sequence read”) are short sequences of nucleotides produced by any sequencing process described herein or known in the art. Reads can be generated from one end of nucleic acid fragments (single-end reads), and sometimes are generated from both ends of nucleic acid fragments (e.g., paired-end reads, double-end reads). In embodiments, a sequencing process generates short sequencing reads or “short reads.” In embodiments, the nominal, average, mean or absolute length of short reads sometimes is about 10 continuous nucleotides to about 250 or more contiguous nucleotides. In certain embodiments, the nominal, average, mean or absolute length of short reads sometimes is about 50 continuous nucleotides to about 150 or more contiguous nucleotides.

[0138] The length of a sequence read often is associated with the particular sequencing technology utilized. High-throughput methods, for example, provide sequence reads that can vary in size from tens to hundreds of base pairs (bp). Nanopore sequencing, for example, can provide sequence reads that can vary in size from tens to hundreds to thousands of base pairs. In some embodiments, sequence reads are of a mean, median, average or absolute length of about 15 bp to about 900 bp long. In certain embodiments sequence reads are of a mean, median, average or absolute length of about 1000 bp or more. In some embodiments, sequence reads are of a mean, median, average or absolute length of about 100 bp to about 200 bp.

[0139] Reads generally are representations of nucleotide sequences in a physical nucleic acid. For example, in a read containing an ATGC depiction of a sequence, “A” represents an adenine nucleotide, “T” represents a thymine nucleotide, “G” represents a guanine nucleotide and “C” represents a cytosine nucleotide, in a physical nucleic acid.

[0140] In certain embodiments, “obtaining” nucleic acid sequence reads of a sample from a plant and/or “obtaining” nucleic acid sequence reads from one or more amplification products can involve directly sequencing nucleic acid to obtain the sequence information. In some embodiments, “obtaining” can involve receiving sequence information obtained directly from a nucleic acid by another.

[0141] In certain embodiments, some or all nucleic acids in a sample are enriched and/or amplified (e.g., non-specifically, or specifically using amplification primers described herein) prior to or during sequencing. In certain embodiments, specific nucleic acid species or subsets in a sample are enriched and/or amplified prior to or during sequencing. In some embodiments, nucleic acid from a pathogen may be enriched and/or amplified prior to or during sequencing, while nucleic acid from a host plant is not enriched and/or amplified prior to or during sequencing. For example, nucleic acid from the genome of the plant cultivar can be enriched and/or amplified prior to or during sequencing, while nucleic acid from the Cannabis genome is not enriched and/or amplified prior to or during sequencing. In embodiments, nucleic acids in a sample are not enriched and/or amplified prior to or during sequencing.

[0142] In certain embodiments, one nucleic acid sample from one plant is sequenced. In certain embodiments, nucleic acids from each of two or more samples are sequenced, where samples are from one plant or from different plants. In certain embodiments, nucleic acid samples from two or more biological samples are pooled, where each biological sample is from one plant or two or more plants, and the pool is sequenced. In the latter embodiments, a nucleic acid sample from each biological sample often is identified by one or more unique identifiers.

[0143] A sequencing method can utilize identifiers that allow multiplexing of sequence reactions in a sequencing process. The greater the number of unique identifiers, the greater the number of samples and/or chromosomes for detection, for example, that can be multiplexed in a sequencing process. A sequencing process can be performed using any suitable number of unique identifiers (e.g., 4, 8, 12, 24, 48, 96, or more).

[0144] A sequencing process sometimes makes use of a solid phase, and sometimes the solid phase comprises a flow cell on which nucleic acid from a library can be attached and reagents can be flowed and contacted with the attached nucleic acid. A flow cell sometimes includes flow cell lanes and use of identifiers can facilitate analyzing a number of samples in each lane A flow cell often is a solid support that can be configured to retain and/or allow the orderly passage of reagent solutions over bound analytes. Flow cells frequently are planar in shape, optically transparent, generally in the millimeter or sub-millimeter scale, and often have channels or lanes in which the analyte/reagent interaction occurs. In embodiments, the number of samples analyzed in a given flow cell lane is dependent on the number of unique identifiers utilized during library preparation and/or probe design. Multiplexing using 12 identifiers, for example, allows simultaneous analysis of 96 samples (e.g., equal to the number of wells in a 96 well microwell plate) in an 8-lane flow cell. Similarly, multiplexing using 48 identifiers, for example, allows simultaneous analysis of 384 samples (e.g., equal to the number of wells in a 384 well microwell plate) in an 8-lane flow cell. Non-limiting examples of commercially available multiplex sequencing kits include Illumina’s multiplexing sample preparation oligonucleotide kit and multiplexing sequencing primers and PhiX control kit (e.g., Illumina’s catalog numbers PE-400-1001 and PE-400-1002, respectively).

[0145] In some embodiments a targeted enrichment, amplification and/or sequencing approach is used. A targeted approach often isolates, selects and/or enriches a subset of nucleic acids in a sample for further processing by use of sequence-specific oligonucleotides. In some embodiments, a library of sequence-specific oligonucleotides are utilized to target (e.g., hybridize to) one or more sets of nucleic acids in a sample. Sequence-specific oligonucleotides and/or primers are often selective for particular sequences (e.g., unique nucleic acid sequences) present in one or more chromosomes, genes, exons, introns, and/or regulatory regions of interest. For example, primers specific for the unique subsequences in the TPS gene profile of a plant genome can be used for a targeted enrichment, amplification and/or sequencing approach. Any suitable method or combination of methods can be used for enrichment, amplification and/or sequencing of one or more subsets of targeted nucleic acids. In certain embodiments, targeted sequences are isolated and/or enriched by capture to a solid phase (e.g., a flow cell, a bead) using one or more sequence-specific anchors. In some embodiments targeted sequences are enriched and/or amplified by a polymerase-based method (e.g., a PCR-based method, by any suitable polymerase-based extension) using sequence-specific primers and/or primer sets (e.g., primers provided herein). Sequence specific anchors often can be used as sequence-specific primers.

[0146] In embodiments, nucleic acid is sequenced and the sequencing product (e.q., a collection of sequence reads) is processed prior to, or in conjunction with, an analysis of the sequenced nucleic acid. For example, sequence reads can be processed according to one or more of the following: aligning, mapping, filtering, counting, normalizing, weighting, generating a profile, and the like, and combinations thereof. Certain processing steps may be performed in any order and certain processing steps may be repeated.

### Solid Supports

[0147] Provided herein are solid supports that include the primers provided herein. The primers can directly be attached to the solid support, such as by covalent linkage, or can otherwise be associated with the solid support. For example, the primers can include, in addition to a sequence complementary to a unique subsequence of a TPS gene or paralog thereof in the genome of a plant cultivar of interest, a sequence that is complementary to a nucleic acid sequence that is directly attached to the solid support. The solid supports that include the primers provided herein can be contacted with nucleic acid from a sample obtained from a plant cultivar, under conditions that facilitate hybridization of a primer to a corresponding unique subsequence of a TPS gene or paralog thereof in the genome of a plant cultivar of interest. The resulting hybrids can directly be analyzed, such as by a signal or a label, for the presence or absence of hybridized product containing one or more primers specifically bound to a unique subsequence of a TPS gene in the nucleic acid. Alternately, the resulting hybrids can be subjected to polymerase-based extension reaction conditions using, e.g., one or more labeled nucleotides that can be incorporated into an extension product, thereby identifying, based on the presence or absence of a label in the extension product, whether a TPS gene or paralog thereof is present in the genome of a plant cultivar of interest.

[0148] The term “solid support” or “solid phase” as used herein refers to a wide variety of materials including solids, semi-solids, gels, films, membranes, meshes, felts, composites, particles, and the like typically used to sequester molecules, and more specifically refers to an insoluble material with which nucleic acid can be associated. A solid support for use with processes described herein sometimes is selected in part according to size: solid supports having a size smaller than the size a microreactor sometimes are selected. Examples of solid supports for use with processes described herein include, without limitation, beads (e.g., microbeads, nanobeads), particles (e.g., microparticles, nanoparticles) and chips.

[0149] The terms “beads” and “particles” as used herein refer to solid supports suitable for associating with biomolecules, and more specifically nucleic acids. Beads may have a regular (e.g., spheroid, ovoid) or irregular shape (e.g., rough, jagged), and sometimes are non-spherical (e.g., angular, multi-sided). Particles or beads having a nominal, average or mean diameter less than the nominal, average, mean or minimum diameter of a microreactor can be utilized. Particles or beads having a nominal, average or mean diameter of about 1 nanometer to about 500 micrometers can be utilized, such as those having a nominal, mean or average diameter, for example, of about 10 nanometers to about 100 micrometers; about 100 nanometers to about 100 micrometers; about 1 micrometer to about 100 micrometers; about 10 micrometers to about 50 micrometers; about 1, 5, 10, 15, 20, 25, 30, 35, 40, 45, 50, 55, 60, 65, 70, 75, 80, 85, 90, 95, 100, 200, 300, 400, 500, 600, 700, 800 or 900 nanometers; or about 1, 5, 10, 15, 20, 25, 30, 35, 40, 45, 50, 55, 60, 65, 70, 75, 80, 85, 90, 95, 100, 200, 300, 400, 500 micrometers.

[0150] A bead or particle can be made of virtually any insoluble or solid material. For example, the bead or particle can comprise or consist essentially of silica gel, glass (e.g. controlled-pore glass (CPG)), nylon, Sephadex®, Sepharose®, cellulose, a metal surface (e.g. steel, gold, silver, aluminum, silicon and copper), a magnetic material, a plastic material (e.g., polyethylene, polypropylene, polyamide, polyester, polyvinylidenedifluoride (PVDF)) and the like. Beads or particles may be swellable (e.g., polymeric beads such as Wang resin) or non-swellable (e.g., CPG). Commercially available examples of beads include without limitation Wang resin, Merrifield resin and Dynabeads®. Beads may also be made as solid particles or particles that contain internal voids.

[0151] The solid supports can be provided in a collection of solid supports. A solid support collection can include two or more different solid support species. The term “solid support species” as used herein refers to a solid support in association with one particular primer or primer pair provided herein, or a combination of different primers or primer pairs. In certain embodiments, a solid support includes about 1, 2, 3, 4, 5, 6, 7, 8, 9, 10, 15, 20, 25, 30, 35, 40, 45, 50, 55, 60, 65, 70, 75, 80, 85, 90, 95, 100, 200, 300, 400, 500, 600, 650 or 700 or more primers that specifically bind to unique subsequences of one or more TPS genes or paralogs thereof in one or more plant cultivars of interest. The solid supports (e.g., beads) in the collection of solid supports can be homogeneous (e.g., all are Wang resin beads) or heterogeneous (e.g., some are Wang resin beads, and some are magnetic beads). In certain embodiments, one or more primers selected from among SEQ ID NOS:1-1284, 1398, 1399, in Primer Groups 1-19 as set forth in Tables 1-16, and in B3/F3 polynucleotide primer pairs set forth in Tables 17-35, are attached or otherwise associated with a solid support, or a collection of solid supports. In embodiments, one or more primers selected from among those set forth in SEQ ID NOS: 1-1284, 1398, 1399, in Primer Groups 1-19 as set forth in Tables 1-16, and in B3/F3 polynucleotide primer pairs set forth in Tables 17-35, or sequences that share 90%, 91%, 92%, 93%, 94%, 95%, 96%, 97%, 98%, 99% or more identity with any of the sequences set forth in SEQ ID NOS: 1-1284, are attached or otherwise associated with a solid support, or a collection of solid supports.

[0152] The primers attached to the solid supports generally are single-stranded and are of any type suitable for hybridizing sample nucleic acid (e.g., DNA, RNA, analogs thereof (e.g., peptide nucleic acid (PNA)), chimeras thereof (e.g., a single strand comprises RNA bases and DNA bases) and the like). The primers can be associated with the solid support in any manner suitable for hybridization of the primers to nucleic acid from the plant cultivar. The primers can be in association with a solid support by a covalent linkage or a non-covalent interaction. Non-limiting examples of non-covalent interactions include hydrophobic interactions (e.g., C18 coated solid support and tritylated nucleic acid), polar interactions (e.g., “wetting” association between nucleic acid/polyethylene glycol), pair interactions including without limitation, antibody/antigen, antibody/antibody, antibody/antibody fragment, antibody/antibody receptor, antibody/protein A or protein G, hapten/anti-hapten, biotin/avidin, biotin/streptavidin, folic acid/folate binding protein, vitamin B12/intrinsic factor, nucleic acid/complementary nucleic acid (e.g., DNA, RNA, PNA) and the like.

[0153] The primers provided herein also can be associated with a solid support by different methodology, which include, without limitation (i) sequentially synthesizing nucleic acid directly on a solid support, and (ii) synthesizing nucleic acid, providing the nucleic acid in solution phase and linking the nucleic acid to a solid support. The primers can be linked covalently at various sites in the nucleic acid to the solid support, such as (i) at a 1′, 2′, 3′, 4′ or 5′ position of a sugar moiety or (ii) a pyrimidine or purine base moiety, of a terminal or non-terminal nucleotide of the nucleic acid, for example. The 5′ terminal nucleotide of the primer can be linked to the solid support, in certain embodiments.

[0154] Methods for sequentially synthesizing nucleic acid directly on a solid support are known. For example, the 3′ end of nucleic acid can be linked to the solid support (e.g., phosphoramidite method described in Caruthers, Science 230: 281-286 (1985)) or the 5′ end of the nucleic acid can be linked to the solid support (e.g., Claeboe et al, Nucleic Acids Res. 31(19): 5685-5691 (2003)).

[0155] Methods for linking solution phase nucleic acid to a solid support also are known (e.g., U.S. Pat. No. 6,133,436, naming Koster et al. and entitled “Beads bound to a solid support and to nucleic acids” and WO 91/08307, naming Van Ness and entitled “Enhanced capture of target nucleic acid by the use of oligonucleotides covalently attached to polymers”). Examples include, without limitation, thioether linkages (e.g., thiolated nucleic acid); disulfide linkages (e.g., thiol beads, thiolated nucleic acid); amide linkages (e.g., Wang resin, amino-linked nucleic acid); acid labile linkages (e.g., glass beads, tritylated nucleic acid) and the like. Nucleic acid can be linked to a solid support without a linker or with a linker (e.g., S. S. Wong, “Chemistry of Protein Conjugation and Cross-Linking,” CRC Press (1991), and G. T. Hermanson, “Bioconjugate Techniques,” Academic Press (1995). A homo or hetero-biofunctional linker reagent, can be selected, and examples of linkers include without limitation N-succinimidyl(4-iodoacetyl) aminobenzoate (SlAB), dimaleimide, dithio-bis-nitrobenzoic acid (DTNB), N-succinimidyl-S-acetyl-thioacetate (SATA), N-succinimidyl-3-(2-pyridyldithio) propionate (SPDP), succinimidyl 4-(N-maleimidomethyl)cyclohexane-1-carboxylate (SMCC), 6-hydrazinonicotimide (HYNIC), 3-amino-(2-nitrophenyl)propionic acid and the like.

[0156] Nucleic acid can be synthesized using standard methods and equipment, such as the ABl®3900 High Throughput DNA Synthesizer and EXPEDITE®8909 Nucleic Acid Synthesizer, both of which are available from Applied Biosystems (Foster City, CA). Analogs and derivatives are described in U.S. Pat. Nos. 4,469,863; 5,536,821; 5,541,306; 5,637,683; 5,637,684; 5,700,922; 5,717,083; 5,719,262; 5,739,308; 5,773,601; 5,886,165; 5,929,226; 5,977,296; 6,140,482; WO 00/56746; WO 01/14398, and related publications. Methods for synthesizing nucleic acids containing such analogs or derivatives are disclosed, for example, in the patent publications cited above and in U.S. Pat. Nos. 5,614,622; 5,739,314; 5,955,599; 5,962,674; 6,117,992; in WO 00/75372 and in related publications. In certain embodiments, analog nucleic acids include inosines, abasic sites, locked nucleic acids, minor groove binders, duplex stabilizers (e.g., acridine, spermidine) and/or other melting temperature modifiers (e.g., target nucleic acid, solid phase nucleic acid, and/or primer nucleic acid may comprise an analog).

[0157] The density of solid phase-bound primer molecules per solid support unit (e.g., one bead or one sample location of a chip) can be selected. A maximum density can be selected that allows for hybridization of sample nucleic acid from the plant cultivar to solid phase-bound primers. In certain embodiments, solid phase-bound primer density per solid support unit (e.g., nucleic acid molecules per bead) is about 5 nucleic acids to about 10,000 nucleic acids per solid support. The density of the solid phase-bound primer per unit solid support in some embodiments can be about 5, 10, 15, 20, 25, 30, 35, 40, 45, 50, 55, 60, 65, 70, 75, 80, 85, 90, 95, 100, 200, 300, 400, 500, 600, 700, 800, 900, 1000, 2000, 3000, 4000, 5000, 6000, 7000, 8000, 9000 or 10000 nucleic acids per solid support. In certain embodiments the density of the solid phase-bound primer per unit solid support is about 1 to 1 (e.g., one molecule of solid phase nucleic acid to one bead).

[0158] In certain embodiments, the solid supports can include any number of primer species useful for carrying out the analysis methods provided herein. Solid supports having primers attached or otherwise attached thereto can be provided in any convenient form for contacting a sample nucleic acid from a plant cultivar, such as solid or liquid form, for example. In certain embodiments, a solid support can be provided in a liquid form optionally containing one or more other components, which include without limitation one or more buffers or salts. Solid supports of a collection can be provided in one container or can be distributed across multiple containers.

[0159] Solid supports can be provided in an array in certain embodiments, or instructions can be provided to arrange solid supports in an array on a substrate. The term “array” as used herein can refer to an arrangement of sample locations (for nucleic acid samples from plant cultivars) on a single two-dimensional solid support, or an arrangement of solid supports across a two-dimensional surface. An array can be of any convenient general shape (e.g., circular, oval, square, rectangular). An array can be referred to as an “X by Y array” for square or rectangular arrays, where the array includes X number of sample locations or solid supports in one dimension and Y number of sample locations or solid supports in a perpendicular dimension. An array can be symmetrical (e.g., a 16 by 16 array) or non-symmetrical (e.g., an 8 by 16 array). An array may include any convenient number of sample locations or solid supports in any suitable arrangement. For example, X or Y independently can be 1, 2, 3, 4, 5, 6, 7, 8, 9, 10, 11, 12, 13, 14, 15, 16, 17, 18, 19, 20, 21, 22, 23, 24, 25, 26, 27, 28, 29 or 30 in some embodiments.

[0160] An array can contain one solid support species or multiple solid support species from a collection. The array can be arranged on any substrate suitable for sequence analysis or manufacture processes described herein. Examples of substrates include without limitation flat substrates, filter substrates, wafer substrates, etched substrates, substrates having multiple wells or pits (e.g., microliter (about 1 microliter, 5, 10, 15, 20, 25, 30, 35, 40, 45, 50, 55, 60, 65, 70, 75, 80, 85, 90, 95, 100, 110, 120, 130, 140, 150, 160, 170, 180, 190, 200, 300, 400, 500, 600, 700, 800, 900 and up to about 999 microliter volume), nanoliter (1 nanoliter, 5, 10, 15, 20, 25, 30, 35, 40, 45, 50, 55, 60, 65, 70, 75, 80, 85, 90, 95, 100, 110, 120, 130, 140, 150, 160, 170, 180, 190, 200, 300, 400, 500, 600, 700, 800, 900 and up to about 999 nanoliter volume), picoliter (1 picoliter, 5, 10, 15, 20, 25, 30, 35, 40, 45, 50, 55, 60, 65, 70, 75, 80, 85, 90, 95, 100, 110, 120, 130, 140, 150, 160, 170, 180, 190, 200, 300, 400, 500, 600, 700, 800, 900 and up to about 999 picoliter volume) wells or pits; wells having filter bottoms), substrates having one or more channels, substrates having one or more electrodes, chips and the like, and combinations thereof. Wells or pits of multiple well and pit substrates can contain one or more solid support units (e.g., each unit being a single bead or particle). Substrates can include a suitable material for conducting sequence analysis or nucleic acid manufacture processes described herein, including without limitation, fiber (e.g., fiber filters), glass (e.g., glass surfaces, fiber optic surfaces), metal (e.g., steel, gold, silver, aluminum, silicon and copper; metal coating), plastic (e.g., polyethylene, polypropylene, polyamide, polyvinylidenedifluoride), silicon and the like. In certain embodiments, the array can be a microarray or a nanoarray. A “nanoarray,” often is an array in which solid support units are separated by about 0.1 nanometers to about 10 micrometers, for example from about 1 nanometer to about 1 micrometer (e.g. about 0.1 nanometers, 0.5, 1, 2, 3, 4, 5, 10, 20, 30, 40, 50, 60, 70, 80, 90, 100, 200, 300, 400, 500, 600, 700, 800, 900 nanometers, 1 micrometer, 2, 3, 4, 5, 6, 7, 8, 9, and up to about 10 micrometers). A “microarray” is an array in which solid support units are separated by more than 1 micrometer. The density of solid support units on arrays often is at least 100/cm², and can be 100/cm² to about 10,000/cm², 100/cm² to about 1,000/cm² or about 150, 200, 300, 400, 500, 600, 700, 800, 900, 1000, 2000, 3000, 4000, 5000, 6000, 7000, 8000, 9000 or 10000 solid support units/cm².

### Applications / Uses

[0161] The methods provided herein can provide an outcome indicative of one or more characteristics of a plant cultivar, including, but not limited to, a TPS gene profile, a terpene profile, a cannabinoid profile, a flavonoid profile, and the presence of a genetic variation in a TPS gene or paralog thereof.

[0162] This information in turn permits identifying and selecting plants of desired genotype or phenotype for agricultural, industrial or medicinal applications based on desired characteristics, such as lineage, resistance or affinity for an organism or condition, or therapeutic activity, and using the selected plants or portions or extracts thereof in methods provided herein, such as methods of breeding, methods of cultivating a crop, and methods of treatment.

[0163] Provided herein are plant cultivars identified as containing at least one terpene synthase gene having at least one subsequence, such as an exon, that is amplified by the methods provided herein. In embodiments, the plant cultivars are Cannabis plant cultivars. Examples of plant cultivars selected for desirable properties (e.g., medicinal uses, insecticidal properties) according to the methods provided herein include, but are not limited to:

[0164] (a)- A plant that would produce a non-volatile extract to preserve the smell, taste, and aroma of the plant material or an extract thereof by selecting parent cultivars to breed offspring expressing terpene synthase genes that provide such properties, e.g., one or more of the genes designated as follows, or genes that are similar thereto in sequence, structure and/or function, and/or products thereof:
[0165] Sesquiterpene Synthases, aka “TPS-a” gene list. Examples include:
   [0166] TPS4-like
   [0167] TPS9-like1
   [0168] TPS9-like2
   [0169] TPS50
   [0170] TPS18
   [0171] TPS14
   [0172] TPS7
   [0173] TPS4
   [0174] TPS32
   [0175] TPS9
   [0176] TPS20
   [0177] TPS8-like
   [0178] TPS8
   [0179] TPS23
   [0180] TPS44
   [0181] TPS59
   [0182] TPS55
   [0183] TPS58
   [0184] TPS69
For example, TPS4-likeJL, TPS9-like1JL, TPS9-like2JL, TPS50JL, TPS18JL, TPS14JL, TPS7JL, TPS4JL, TPS32JL, TPS9JL, TPS20JL, TPS8-likeJL, TPS8JL, TPS23JL, TPS44JL, TPS59JL, TPS55JL, TPS58JL, TPS69JL.

[0185] (b)- A plant that would produce a volatile smell profile to produce an aromatic and fragrant extract and/or have anti-pathogenic properties by selecting parent cultivars to breed offspring expressing terpene synthase genes that provide such properties, e.g., one or more of the genes designated as follows, or genes that are similar thereto in sequence, structure and/or function, and/or products thereof:
[0186] Monoterpene Synthases, aka “TPS-b” gene list. Examples include:
   [0187] TPS13-like2
   [0188] TPS13
   [0189] TPS17
   [0190] TPS30
   [0191] TPS64
   [0192] TPS6-like
   [0193] TPS6
   [0194] TPS11-like
   [0195] TPS51
   [0196] TPS30-like
   [0197] TPS3
   [0198] TPS52
   [0199] TPS5
   [0200] TPS13-like1
   [0201] TPS42
   [0202] TPS1
   [0203] TPS53
   [0204] TPS12
   [0205] TPS40
   [0206] TPS63
   [0207] TPS33
   [0208] TPS61
   [0209] TPS12-like
   [0210] TPS62
   [0211] TPS2
   [0212] TPS43
   [0213] TPS11
   [0214] TPS38
   [0215] TPS36
   [0216] TPS37
For example, TPS13-like2JL, TPS13JL, TPS17JL, TPS30JL, TPS64JL, TPS6-likeJL, TPS6JL, TPS11-likeJL, TPS51JL, TPS30-likeJL, TPS3JL, TPS52JL, TPS5JL, TPS13-like1JL, TPS42JL, TPS1JL, TPS53JL, TPS12JL, TPS40JL, TPS63JL, TPS33JL, TPS61JL, TPS12-likeJL, TPS62JL, TPS2JL, TPS43JL, TPS11JL, TPS38JL, TPS36JL, TPS37JL.

[0217] (c)- A plant having the absence of one or more monoterpene synthase (TPS-b) genes that use GPP as a precursor to allow for greater cannabinoid production by selecting parent cultivars to breed to breed offspring not expressing or having reduced expression of terpene synthase genes that interfere with cannabinoid production, e.g., one or more of the genes listed in (b) above, or genes that are similar thereto in sequence, structure and/or function, and/or products thereof.

[0218] (d)- A plant that would contain one or more root specifically expressed terpene synthases to increase resistance against pests in the soil and/or respond favorably to beneficial microorganisms in the soil such as beneficial insects, mycorrhizal fungi and beneficial bacteria by selecting parent cultivars to breed offspring expressing terpene synthase genes and/or products that provide such properties, e.g., one or more of the genes designated as follows, or genes that are similar thereto in sequence, structure and/or function, and/or products thereof:
[0219] TPS11
[0220] TPS49
[0221] TPS41
[0222] TPS12
[0223] TPS11-like
[0224] TPS36
[0225] TPS6
[0226] TPS37
[0227] TPS64
For example, TPS11JL, TPS49JL, TPS41JL, TPS12JL, TPS11-likeJL, TPS36JL, TPS6JL, TPS37JL, TPS64JL.

[0228] (e)- A plant that would contain one or more predominantly stem specifically expressed terpene synthases to increase resistance against pests that are stem-hosted, e.g., stem-hosted insects, by selecting parent cultivars to breed offspring expressing terpene synthase genes and/or products that provide such properties, e.g., one or more of the one or more of the genes designated as follows, or genes that are similar thereto in sequence, structure and/or function, and/or products thereof:
[0229] TPS63
[0230] TPS43
[0231] TPS6-like
[0232] TPS33
[0233] TPS24
For example, TPS63JL, TPS43JL, TPS41JL, TPS6-likeJL, TPS33JL, TPS24JL.

[0234] The cultivars listed in (f) through (r) below are identified and/or selected for the production of desired terpene product profiles for the indicated applications. Examples of enzymes that can generate all or part of the terpene product profiles for Cannabis are listed (“cs” TPS enzymes). It is understood that one of skill in the art can identify, for any given plant cultivar, TPS enzymes that are similar in sequence, structure and/or function as the indicated Cannabis TPS enzymes and can obtain specialized cultivars having similar terpene product profiles. In is understood that TPS enzymes that are similar in function to the indicated “Cs” (Cannabis Sativa) enzymes are contemplated in the cultivars and methods provided herein.

[0235] (f)- A plant for terpene dominance that changes the smell and/or therapeutic/physiologic effect of the plant and/or extract thereof, or selecting parent cultivars to breed offspring expressing terpene synthase genes and/or products that provide such properties, e.g., one or more of the following genes and/or products:

| | |
|---|---|
| Genes: Major Product (Minor Product) | Terpene Product to Breed For: |
| CsTPS9FN | β-caryophyllene |
| CsTPS3FN, csTPS5PK, csTPS5FN, csTPS15CT, csTPS17AK, csTPS23Choc, csTPS30PK (csTPS32PK, csTPS7PK, csTPS1SK, csTPS2SK) | Myrcene |
| CsTPS31PK, csTPS37FN (csTPS32PK, csTPS24Choc, csTPS1 SK) | Terpinolene |
| csTPS1SK, csTPS14CT (csTPS5FN, csTPS5PK, csTPS7FN, csTPS23Choc, csTPS30PK, csTPS32PK) | Limonene |
| CsTPS25LS (CsTPS32PK) | β-Farnescene |
| csTPS2SK (csTPS1SK, csTPS5FN, csTPS30PK) | Alpha-Pinene |

[0236] (g)- A plant for producing an energetic effect when the plant or an extract thereof is ingested and/or vaporized (e.g., as a spray or for inhalation), or selecting parent cultivars to breed offspring expressing or not expressing terpene synthase genes and/or products that result in such properties, e.g., presence or lack thereof of one or more of the following genes and/or products:

| | |
|---|---|
| Genes: Major Product (Minor Product) | Terpene Product to Breed For: |
| CsTPS18VF (CsTPS19BL) | S-linalool |
| CsTPS31PK, csTPS37FN (csTPS32PK, csTPS24Choc, csTPS1SK) | Terpinolene |
| csTPS6PK, csTPS13PK, and csTPS38FN (csTPS7AK) | β-Ocimene |
| CsTPS2FN, csTPS5FN (CsTPS32PK | α-Pinene >> β-pinene |
| CsTPS18Choc (CsTPS19BL) | Lack of R-linalool |
| (csTPS5PK, csTPS17AK, csTPS31PK, csTPS32PK) | Lack of α-terpineol |
| | Lack of fenchol |
| csTPS37LPA5 | 3-carene |

[0237] (h)- A plant for producing a sedative effect when the plant or an extract thereof is ingested and/or vaporized (e.g., as a spray or for inhalation), or selecting parent cultivars to breed offspring expressing or not expressing terpene synthase genes and/or products that result in such properties, e.g., presence or lack thereof of one or more of the following genes and/or products:

| | |
|---|---|
| Genes: Major Product (Minor Product) | Terpene Product to Breed For: |
| CsTPS31PK, csTPS2SK (csTPS1SK, csTPS5FN, csTPS5PK, csTPS30PK) | β-pinene = α-Pinene (equal amounts) |
| CsTPS18Choc (CsTPS19BL) | R-linalool |
| csTPS1SK, csTPS14CT (csTPS5FN, csTPS5PK, csTPS7FN, csTPS23Choc, csTPS30PK, csTPS32PK) | Limonene |
| csTPS18VF, csTPS19BL, csTPS35LS (csTPS22PK, csTPS25LS, csTPS32PK) | Trans-nerolidol |
| (csTPS5PK, csTPS17AK, csTPS31PK, csTPS32PK) | Terpineol |
| CsTPS32PK | Camphene |
| csTPS6PK, csTPS13PK, and csTPS38FN (csTPS7AK) | Lack of β-ocimene |
| CsTPS18VF (CsTPS19BL) | Lack of S-Linalool |
| CsTPS31PK, csTPS37FN (csTPS32PK, csTPS24Choc, csTPS1SK) | Lack of Terpinolene |

[0238] (i)- A plant that would produce a cognitive-enhancing effect when the plant, or extract thereof, is ingested and/or vaporized, or selecting parent cultivars to breed offspring expressing terpene synthase genes and/or products that provide such properties, e.g., one or more of the following genes and/or products:

| | |
|---|---|
| Genes: Major Product (Minor Product) | Terpene Product to Breed For: |
| csTPS2FN, csTPS5FN, and csTPS32PK | α-Pinene >> β-pinene |
| csTPS6PK, csTPS13PK, and csTPS38FN (csTPS7AK) | β-ocimene |
| | Eucalyptol |

[0239] (j)- A plant that would produce an appetite-suppressing effect when the plant, or extract thereof, is ingested and/or vaporized, or selecting parent cultivars to breed offspring expressing terpene synthase genes and/or products that provide such properties, e.g., one or more of the following genes and/or products:

| | |
|---|---|
| Genes: Major Product (Minor Product) | Terpene Product to Breed For: |
| CsTPS9FN (csTPS4FN, csTPS22PK) | Humulene |

[0240] (k)- A plant that would produce an anti-inflammatory effect when the plant, or extract thereof, is ingested and/or vaporized, or selecting parent cultivars to breed offspring expressing terpene synthase genes and/or products that provide such properties, e.g., one or more of the following genes and/or products:

| | |
|---|---|
| Genes: Major Product (Minor Product) | Terpene Product to Breed For: |
| csTPS2SK (csTPS1SK, csTPS5FN, csTPS30PK) | α-Pinene |
| CsTPS9FN (csTPS4FN, csTPS22PK) | Humulene |
| CsTPS9FN | β-caryophyllene |

[0241] (I)- A plant that would produce an anxiolytic (anti-anxiety) effect when the plant, or extract thereof, is ingested and/or vaporized, or selecting parent cultivars to breed offspring expressing terpene synthase genes and/or products that provide such properties, e.g., one or more of the following genes and/or products:

| | |
|---|---|
| Genes: Major Product (Minor Product) | Terpene Product to Breed For: |

| | |
|---|---|
| csTPS2SK (csTPS1SK, csTPS5FN, csTPS30PK) | α-Pinene |
| CsTPS9FN (csTPS4FN, csTPS22PK) | Humulene |
| CsTPS9FN | β-caryophyllene |
| csTPS17AK, csTPS18VF, csTPS18Choc, csTPS19BL, csTPS29BC, csTPS35LS (csTPS31PK) | Linalool |
| csTPS18VF, csTPS19BL, csTPS35LS (csTPS22PK, csTPS25LS, csTPS32PK) | Nerolidol |
| csTPS1SK, csTPS14CT (csTPS5FN, csTPS5PK, csTPS7FN, csTPS23Choc, csTPS30PK, csTPS32PK) | Limonene |

[0242] (m)- A plant that would produce an antinociceptive effect when the plant, or extract thereof, is ingested and/or vaporized, or selecting parent cultivars to breed offspring expressing terpene synthase genes and/or products that provide such properties, e.g., one or more of the following genes and/or products:

| | |
|---|---|
| Genes: Major Product (Minor Products) | Terpene Product to Breed For: |
| csTPS5PK (csTPS31PK, csTPS32PK) | α-bisabolol |
| (csTPS5PK, csTPS17AK, csTPS31PK, csTPS32PK) | α -terpineol |
| csTPS18VF, csTPS19BL, csTPS35LS (csTPS22PK, csTPS25LS, csTPS32PK) | trans nerolidol |
| (CsTPS2SK, csTPS32PK, TPS37LPA5) | α-phellandrene |
| | Eucalyptol |

[0243] (n)- A plant that would produce a body relaxing effect when the plant, or extract thereof, is ingested and/or vaporized, or selecting parent cultivars to breed offspring expressing terpene synthase genes and/or products that provide such properties, e.g., one or more of the following genes and/or products:

| | |
|---|---|
| Genes: Major Product (Minor Product) | Terpene Product to Breed For: |
| csTPS5PK (csTPS31PK, csTPS32PK) | α-bisabolol |
| (csTPS5PK, csTPS17AK, csTPS31PK, csTPS32PK) | α -terpineol |
| csTPS18VF, csTPS19BL, csTPS35LS (csTPS22PK, csTPS25LS, csTPS32PK) | trans nerolidol |
| (CsTPS2SK, csTPS32PK, TPS37LPA5) | α-phellandrene |

[0244] (o)- A plant that would produce an anti-depressant effect when the plant, or extract thereof, is ingested and/or vaporized, or selecting parent cultivars to breed offspring expressing terpene synthase genes and/or products that provide such properties, e.g., one or more of the following genes and/or products:

| | |
|---|---|
| Genes: Major Product (Minor Product) | Terpene Product to Breed For: |
| CsTPS31PK, csTPS2SK (csTPS1SK, csTPS5FN, csTPS5PK, csTPS30PK) | b-pinene = a-Pinene |
| csTPS1SK, csTPS14CT (csTPS5FN, csTPS5PK, csTPS7FN, csTPS23Choc, csTPS30PK, csTPS32PK) | Limonene |
| csTPS18VF, csTPS19BL, csTPS35LS (csTPS22PK, csTPS25LS, csTPS32PK) | nerolidol |
| csTPS17AK, csTPS18VF, csTPS18Choc, csTPS19BL, csTPS29BC, csTPS35LS (csTPS31PK) | Linalool |

[0245] (p)- A plant that contains acetyl cholinesterase-inhibitor (AChEI) terpenes, or selecting parent cultivars to breed offspring expressing terpene synthase genes and/or products that provide such properties, e.g., one or more of the following genes and/or products:

| | |
|---|---|
| Genes: Major Product (Minor Product) | Terpene Product to Breed For: |
| csTPS2SK (csTPS1SK, csTPS5FN, csTPS30PK) | α-pinene |
| CsTPS31PK, csTPS37FN (csTPS32PK, csTPS24Choc, csTPS1SK) | Terpinolene |
| csTPS6PK, csTPS13PK, and csTPS38FN (csTPS7AK) | β-ocimene |
| TPS37LPA5 | (3-Carene) |
| csTPS33PK and TPS37LPA5 | α- and γ-terpinene |
| (csTPS5FN, csTPS7FN, csTPS30PK) | Sabinene |

[0246] (q)- A plant that contain one or more of the Herbivore-induced Plant Volatiles (HIPV) terpene synthases (see, e.g., Booth et al., Plant Physiol., 184(1):130-147 (2020), the contents of which are incorporated in their entirety by reference herein), or selecting parent cultivars to breed offspring expressing terpene synthase genes and/or products that provide such properties, e.g., one or more of the following genes and/or products:

| | |
|---|---|
| Genes: Major Product (Minor Product) | Terpene Product to Breed For: |
| csTPS6PK, csTPS13PK, csTPS38FN (csTPS7AK) | Ocimene |
| csTPS17AK, csTPS18VF, csTPS18Choc, csTPS19BL, csTPS29BC, csTPS35LS (csTPS31PK) | Linalool |
| csTPS5PK (csTPS31PK, csTPS32PK) | Bisabolol |
| csTPS18VF, csTPS19BL, csTPS35LS (csTPS22PK, csTPS25LS, csTPS32PK) | Nerolidol |
| csTPS2SK (csTPS1SK, csTPS5FN, csTPS30PK) | α-pinene |
| (csTPS2SK, csTPS1SK, csTPS5FN, csTPS5PK, csTPS30PK) | β-pinene |
| csTPS1SK, csTPS14CT (csTPS5FN, csTPS5PK, csTPS7FN, csTPS23Choc, csTPS30PK, csTPS32PK) | Limonene |
| (csTPS5PK, csTPS17AK, csTPS31 PK, csTPS32PK) | α-terpineol |
| (csTPS5PK, csTPS17AK, csTPS31 PK, csTPS32PK) | Y-elemene |
| (csTPS5PK, csTPS31PK, csTPS32PK) | Bergamotene |
| (csTPS8FN, csTPS16CC, csTPS22PK, csTPS28PK) | Eudesmol |
| csTPS16CC | Germacrene B |
| N/A | Guiaol |
| (csTPS5PK, csTPS17AK, csTPS31PK, csTPS32PK) | Fenchol |
| N/A | Eugenol |

[0247] (r)- A plant that produces, in the plant or in an extract thereof, one or more of the following properties, or selecting parent cultivars to breed offspring expressing terpene synthase genes and/or products that provide such properties, e.g., one or more of the following genes and/or gene products:

Antibacterial Properties:

| | |
|---|---|
| Genes: Major Product (Minor Product) | Terpene Product to Breed For: |
| CsTPS4FN | Aromadendrene |
| | Carvacrol |
| csTPS9FN | β-Caryophyllene |
| TPS-b and/or other | Eucalyptol (1,8-Cineole) |
| TPS-b and/or other | Fenchol |
| csTPS16CC | Germacrene D |
| CsTPS32PK (CsTPS17AK) | Nerol (cis-Geraniol) |
| TPS-b and/or other | Pulegone |
| (csTPS5FN, csTPS7FN, csTPS30PK) | Sabinene |
| CsTPS32PK (CsTPS17AK) | Geraniol |

Antimicrobial Properties:

| | |
|---|---|
| Genes: Major Product (Minor Product) | Terpene Product to Breed For: |
| (CsTPS32PK) | Camphor |
| (csTPS30PK, CsTPS7FN) | Sabinene Hydrate |
| csTPS33PK | Thymol |

Fungicidal Properties:

| | |
|---|---|
| Genes: Major Product (Minor Product) | Terpene Product to Breed For: |
| (CsTPS35PK) | Citronellol |
| csTPS33PK | para-Cymene |
| TPS-b and/or other | Pulegone |
| CsTPS32PK | Geraniol |

Herbicidal Properties:

| | |
|---|---|
| Genes: Major Product (Minor Product) | Terpene Product to Breed For: |
| CsTPS32PK | Geraniol |
| TPS-b and/or other | Pulegone |
| (CsTPS35PK) | Citronellol |
| TPS-b and/or other | Borneol |
| csTPS33PK | para-Cymene |

Pesticidal Properties:

| | |
|---|---|
| Genes: Major Product (Minor Product) | Terpene Product to Breed For: |
| CsTPS4FN - TPS9-like2JL, TPS4-likeJL | Aromadendrene |
| CsTPS5PK (CsTPS32PK - TPS5JL) | α-Bisabolol |
| TPS-a | Cedrol |
| CsTPS18VF, csTPS19BL, csTPS35LS, (csTPS22PK, csTPS25LS, csTPS32PK) | Nerolidol |
| CsTPS18VF, csTPS19BL, csTPS35LS, (csTPS22PK, csTPS25LS, csTPS32PK) | trans-Nerolidol |
| TPS-a | Guaiol |

[0248] Pheromone: Insect attractant (e.g., for pollination; to attract insects that are predators of other insects or other pathogens that cause plant damage) or insecticidal (e.g., contact or fumigant toxicities)

| | |
|---|---|
| Genes: Major Product (Minor Product) | Terpene Product to Breed For: |
| | endo-Borneol |
| | Isoborneol |
| TPS37LPA5 | (3-Carene) |
| | Carveol |
| csTPS16CC | Germacrene B |
| CsTPS21AK | Hedycaryol |
| | Menthol |
| CsTPS18VF, csTPS19BL, csTPS35LS, (csTPS22PK, csTPS25LS, csTPS32PK) | cis-Nerolidol |
| CsTPS6FN, csTPS13PK, csTPS38FN, (csTPS17AK) | cis-β-Ocimene |
| CsTPS6FN, csTPS13PK, csTPS38FN, (csTPS17AK) | trans-β-Ocimene |
| (csTPS30PK, CsTPS7FN) | Sabinene Hydrate |
| csTPS33PK and TPS37LPA5 | α-Terpinen |
| csTPS33PK | Thymol |
| CsTPS25LS (CsTPS32PK) | β-Farnesene |
| CsTPS25LS | α-Farnesene |
| CsTPS8FN, (csTPS16CC, csTPS22PK, csTPS28PK) | γ-Eudesmol |
| CsTPS4FN | Alloaromadendrene |
| (CsTPS8FN, csTPS4FN) | Valencene |
| TPS-b and/or other | Pulegone |

Expectorant Properties:

| | |
|---|---|
| Genes: Major Product (Minor Product) | Terpene Product to Breed For: |
| CsTPS32PK | Camphene |
| CsTPS32PK | Geraniol |
| (csTPS30PK, CsTPS7FN) | Sabinene Hydrate |

[0249] Non-irritant properties: (Breed for reduced production or absence of, e.g., one or more of the following terpene products that are irritants, which can be useful, e.g., when breeding plants such as Cannabis for dermatological uses in salves, creams, ointment and transdermal applications)

| | |
|---|---|
| Genes: Major Product (Minor Product) | Terpene Product to Breed for Absence/Reduced Amount: |
| TPS-b and/or other | Borneol |
| | α-Cedrene |
| (CsTPS35PK) | Citronellol |
| csTPS33PK | para-Cymene |
| | Fenchone (Presence — Counterirritant) |

[0250] The methods of preparing and/or analyzing nucleic acids provided herein, and the primers provided herein for such analysis, permit the identification and select for plants that contain the TPS gene(s) and/or variants of the gene(s) that have desirable characteristics such as desired terpene profiles, ratios of monoterpenes to sesquiterpenes, and/or terpenes that confer agronomic or pathogenesis-related traits (such as insect, pest, mold, mildew, fungus, bacterial, or environmental resistance, as well as attract certain predator or beneficial organisms). The selection can, in embodiments, be used to identify desired parental lines for breeding daughter cultivars that contain desired combinations of these TPS genes or variants of these genes. In addition, the primers provided herein can be used to identify offspring/daughter cultivars that contain the desired gene(s)/variants of these gene(s) from one or both parent cultivars. In addition, the methods of preparing and/or analyzing nucleic acids provided herein, and the primers provided herein for such analysis, can be used for lineage- specific analysis to identify related and distant cultivars to in-breed or out-cross plant cultivars, such as Cannabis cultivars, based on the genetic profiling of unique subsequences (e.g., exons) of TPS genes. Other applications include, but are not limited to:
[0251] (1) Using the TPS gene-specific primers provided herein to increase or decrease terpene production, concentration and bioaccumulation in a plant cultivar, such as Cannabis, including, but not limited to the following terpenes:
   [0252] α-Bisabolol, endo-Borneol, Camphene, Camphor, 3-Carene, Caryophyllene, Caryophyllene Oxide, α-Cedrene, Cedrol, Citronellol, Eucalyptol (1,8 Cineole), α-Farnesene, β-Farnesene, Fenchol, Fenchone, Geraniol, Geranyl Acetate, Guaiol, Humulene, Isoborneol, Isopulegol, D-Limonene, Linalool, Menthol, β-Myrcene, Nerol, trans-Nerolidol, cis-Nerolidol, trans-Ocimene, cis-Ocimene, α-Phellandrene, Phytol 1, Phytol 2, α-Pinene, β-Pinene, Pulegone, Sabinene, Sabinene Hydrate, α-Terpinene, _{Y}-Terpinene, α-Terpineol, Terpinolene, Valencene, _{Y}-Elemene, Z-Ocimene, E-Ocimene, α-Thujone, Thujene, _{Y}-Muurolene, 2-Norpinene, α-Santalene, α-Selinene, Germacrene D, Eudesma-3,7(11)-diene, δ-Cadinol, trans-α-Beramotene, trans-2-pinanol, p-cymen-8-ol, Sativene, Cyclosativene, α-guaiene, _{Y}-gurjunene, α-bulnesene, Bulnesol, α-eudesmol, β-eudesmol, Hedycaryol, _{Y}-eudesmol, Alloaromadendrene, p-cymene, α-Copaene, β-Elemene, α-Cubebene, Linalyl acetate, Bornyl acetate, Heptacosane, Tricosane, S-Limonene, (-)-Thujopsene, Hashenene 5,5-dimethyl-1-vinylbicyclo[2.1.1]hexane, (-)-englerin A, Artemisinin

[0253] Identify more or less active variants of terpene synthase genes for transgenic experiments including CRISPR, Cre-Lox, and other genetic modification applications to transfer the more or less active variant to another Cannabis cultivar via breeding methods strategies while using the primers provided herein to track the inheritance of that gene variant.

[0254] Identify the sub-cellular localization of the TPS genes through identifying the amplicons generated in the methods provided.

[0255] Selecting for terpene genes with tissue-specific expression behavior, such as root, flower, stem, or leaf specific terpene synthase genes.

[0256] Using the TPS gene-specific primers provided herein in a microassay based presence/absence variation (PAV) identification screening tool, to identify the presence or absence of a TPS gene, including whether a genetic variant is present. In embodiments, a panel of information about several or all TPS genes in a plant cultivar can be obtained, and this information can be related to overall terpene production and accumulation in the plant cultivar.

[0257] Using the TPS gene-specific primers provided herein in a cDNA microassay based expression screening tool to identify the level of expression of each gene in the TPS family of a plant cultivar and, in embodiments, relating the level of expression of this panel of genes to overall terpene production and accumulation.

[0258] Using the TPS gene-specific primers provided herein to identify and select for gene variants of monoterpene synthases that would deplete the pre-cursor pool of GPP to lower overall cannabinoid and flavonoid concentrations and, in embodiments, breeding these genes into a higher cannabinoid producing cultivar to lower overall cannabinoid content.

[0259] Using the TPS gene-specific primers provided herein to identify gene variants of monoterpene synthases that would deplete the pre-cursor pool of GPP to raise the overall cannabinoid and flavinoid concentrations and, in embodiments, breeding this genetic profile into another low cannabinoid producing cultivar to higher overall cannabinoid content using these molecular markers.

[0260] Using the TPS gene-specific primers provided herein to select TPS gene combinations that provide specific terpene concentration/production profiles in plants of varying cannabinoid concentration, to decrease the cytotoxicity of the plant extract for medicinal application.

[0261] Using the TPS gene-specific primers provided herein, select TPS gene variants that are linked to higher or lower cannabinoid producing cultivars.

[0262] In certain aspects, the TPS gene-specific primers provided herein, or subsets thereof, can be used, e.g., in genetic testing and/or amplicon sequencing, to identify plants having a TPS gene profile, TPS gene expression profile, one or more TPS gene variants, a terpene profile, a cannabinoid profile, a flavonoid profile or other characteristics or combinations thereof that impart certain properties to the plant including, but not limited to: pathogen resistance (e.g., insect resistance, fungus resistance), adaptability to regional geographic or environmental features that would make the plant less prone to diseases or predators in a certain region or environment (e.g., resistant to certain diseases or predators at the humidity level in the environment in which the plant is grown), or a desired medicinal use or medical effect. In certain embodiments, the medicinal uses / medical effects are selected from among one or more of antioxidant, anti-inflammatory, antibacterial, antiviral, anti-anxiety, antinociceptive, analgesic, antihypertensive, sedative, antidepressant, acetylcholine esterase inhibition (AChEI), neuro-protective and gastro-protective effects. In embodiments, at least one therapeutic effect is AChEl and in certain embodiments, the analytes are terpenes and the terpenes that are scored include one or more terpenes selected from among alpha pinene, eucalyptol, 3 carene, alpha terpinene, gamma terpinene, cis ocimene, trans ocimene and beta caryophyllene oxide. In certain embodiments, at least one therapeutic effect is analgesic and in embodiments, the analytes are terpenes and the terpenes that are scored comprise one or more terpenes selected from among alpha bisabolol, alpha terpineol, alpha phellandrene and nerolidol.

[0263] For example, subsets of these primers can be applied in various specific tests to classify a strain’s effect on its user through genetic testing and/or amplicon sequencing. In aspects, sets of between 1-50, 1-45, 1-40, 1-35, 1-30, 1-25, 1-20, 1-15, 1-10, 1-5, 1-4, 1-3, 2 or 1 TPS genes, or 1, 2, 3, 4, 5, 6, 7, 8, 9, 10, 11, 12, 13, 14, 15, 16, 17, 18, 19, 20, 21, 22, 23, 24, 25, 26, 27, 28, 29, 30, 31, 32, 33, 34, 35, 36, 37, 38, 39, 40, 41, 42, 43, 44, 45, 46, 47, 48, 49, 50, 51, 52, 53, 54, 55, 56, 57, 58, 59, 60 or more, up to 100 or more TPS genes can be assigned as imparting one or more desired property to a plant cultivar. For example, sets of 1-10 TPS genes, when present in a Cannabis cultivar, can be characterized as involved in a specific feeling achieved from administration, e.g., by inhalation or ingestion of a product derived from the Cannabis cultivar. For example, the primers could be used for exon-specific genotyping on genomic DNA for a specific subset of genes to identify genotypes that lead to a change in the presence or level of certain terpenes that are known to be associated with medical/physiological effects such as energy, sedation, mental clarity, mental and physical impairments, appetite stimulation or suppression, and/or the other common effects that are associated with products derived from Cannabis or other plant cultivars, or that are known to be associated with pathogen resistance in a Cannabis or other plant cultivar. In aspects, the TPS genes or portions thereof identified by the methods provided herein and used in the methods provided herein include any TPS gene or combinations of TPS genes that produce one or more of: one or more terpenes selected from among α-Bisabolol, endo-Borneol, Camphene, Camphor, 3-Carene, Caryophyllene, Caryophyllene Oxide, α-Cedrene, Cedrol, Citronellol, Eucalyptol (1,8 Cineole), α-Farnesene, β-Famesene, Fenchol, Fenchone, Geraniol, Geranyl Acetate, Guaiol, Humulene, Isoborneol, Isopulegol, D-Limonene, Linalool, Menthol, β-Myrcene, Nerol, trans-Nerolidol, cis-Nerolidol, trans-Ocimene, cis-Ocimene, α-Phellandrene, Phytol 1, Phytol 2, α-Pinene, β-Pinene, Pulegone, Sabinene, Sabinene Hydrate, α-Terpinene, _{Y}-Terpinene, α-Terpineol, Terpinolene, Valencene, _{Y}-Elemene, Z-Ocimene, E-Ocimene, α-Thujone, Thujene, _{Y}-Muurolene, 2-Norpinene, α-Santalene, α-Selinene, Germacrene D, Eudesma-3,7(11)-diene, δ-Cadinol, trans-α-Beramotene, trans-2-pinanol, p-cymen-8-ol, Sativene, Cyclosativene, α-guaiene, _{Y}-gurjunene, α-bulnesene, Bulnesol, α-eudesmol, β-eudesmol, Hedycaryol, _{Y}-eudesmol, Alloaromadendrene, p-cymene, α-Copaene, β-Elemene, α-Cubebene, Linalyl acetate, Bornyl acetate, Heptacosane, Tricosane, S-Limonene, (-)-Thujopsene, Hashenene 5,5-dimethyl-1-vinylbicyclo[2.1.1]hexane, (-)-englerin A and Artemisinin.

[0264] Examples of such breeding methods for a plant cultivar include, but are not limited to those described below (TPS gene nomenclature is characterized in part in Allen et al, PLoS ONE, 14(9):e0222363 (2019), the contents of which are expressly incorporated in their entirety by reference herein):

[0265] (a)- A method of breeding a plant that would produce a non-volatile extract to preserve the smell, taste, and aroma of the plant material or an extract thereof by selecting parent cultivars to breed offspring expressing terpene synthase genes that provide such properties, e.g., one or more of the genes designated as follows, or genes that are similar thereto in sequence, structure and/or function, and/or products thereof:
[0266] Sesquiterpene Synthases, aka “TPS-a” gene list. Examples include:
   [0267] TPS4-like
   [0268] TPS9-like1
   [0269] TPS9-like2
   [0270] TPS50
   [0271] TPS18
   [0272] TPS14
   [0273] TPS7
   [0274] TPS4
   [0275] TPS32
   [0276] TPS9
   [0277] TPS20
   [0278] TPS8-like
   [0279] TPS8
   [0280] TPS23
   [0281] TPS44
   [0282] TPS59
   [0283] TPS55
   [0284] TPS58
   [0285] TPS69
For example, TPS4-likeJL, TPS9-like1JL, TPS9-like2JL, TPS50JL, TPS18JL, TPS14JL, TPS7JL, TPS4JL, TPS32JL, TPS9JL, TPS20JL, TPS8-likeJL, TPS8JL, TPS23JL, TPS44JL, TPS59JL, TPS55JL, TPS58JL, TPS69JL.

[0286] (b)- A method of breeding a plant that would produce a volatile smell profile to produce an aromatic and fragrant extract and/or have anti-pathogenic properties by selecting parent cultivars to breed offspring expressing terpene synthase genes that provide such properties, e.g., one or more of the genes designated as follows, or genes that are similar thereto in sequence, structure and/or function, and/or products thereof:
[0287] Monoterpene Synthases, aka “TPS-b” gene list. Examples include:
   [0288] TPS13-like2
   [0289] TPS13
   [0290] TPS17
   [0291] TPS30
   [0292] TPS64
   [0293] TPS6-like
   [0294] TPS6
   [0295] TPS11-like
   [0296] TPS51
   [0297] TPS30-like
   [0298] TPS3
   [0299] TPS52
   [0300] TPS5
   [0301] TPS13-like1
   [0302] TPS42
   [0303] TPS1
   [0304] TPS53
   [0305] TPS12
   [0306] TPS40
   [0307] TPS63
   [0308] TPS33
   [0309] TPS61
   [0310] TPS12-like
   [0311] TPS62
   [0312] TPS2
   [0313] TPS43
   [0314] TPS11
   [0315] TPS38
   [0316] TPS36
   [0317] TPS37
For example, TPS13-like2JL, TPS13JL, TPS17JL, TPS30JL, TPS64JL, TPS6-likeJL, TPS6JL, TPS11-likeJL, TPS51JL, TPS30-likeJL, TPS3JL, TPS52JL, TPS5JL, TPS13-like1JL, TPS42JL,TPS1JL, TPS53JL, TPS12JL, TPS40JL, TPS63JL, TPS33JL, TPS61JL, TPS12-likeJL, TPS62JL, TPS2JL, TPS43JL, TPS11JL, TPS38JL, TPS36JL, TPS37JL.

[0318] (c)- A method of breeding a plant for the absence of one or more monoterpene synthase (TPS-b) genes that use GPP as a precursor to allow for greater cannabinoid production by selecting parent cultivars to breed to breed offspring not expressing or having reduced expression of terpene synthase genes that interfere with cannabinoid production, e.g., one or more of the genes listed in (b) above, or genes that are similar thereto in sequence, structure and/or function, and/or products thereof.

[0319] (d)- A method of breeding a plant that would contain one or more root specifically expressed terpene synthases to increase resistance against pests in the soil and/or respond favorably to beneficial microorganisms in the soil such as beneficial insects, mycorrhizal fungi and beneficial bacteria by selecting parent cultivars to breed offspring expressing terpene synthase genes and/or products that provide such properties, e.g., one or more of the genes designated as follows, or genes that are similar thereto in sequence, structure and/or function, and/or products thereof:
[0320] ● TPS11
[0321] ● TPS49
[0322] ● TPS41
[0323] ● TPS12
[0324] ● TPS11-like
[0325] ● TPS36
[0326] ● TPS6
[0327] ● TPS37
[0328] ● TPS64
For example, TPS11JL, TPS49JL, TPS41JL, TPS12JL, TPS11-likeJL, TPS36JL, TPS6JL, TPS37JL, TPS64JL.

[0329] (e)- A method of breeding a plant that would contain one or more predominantly stem specifically expressed terpene synthases to increase resistance against pests that are stem-hosted, e.g., stem-hosted insects, by selecting parent cultivars to breed offspring expressing terpene synthase genes and/or products that provide such properties, e.g., one or more of the one or more of the genes designated as follows, or genes that are similar thereto in sequence, structure and/or function, and/or products thereof:
[0330] TPS63
[0331] TPS43
[0332] TPS6-like
[0333] TPS33
[0334] TPS24
For example, TPS63JL, TPS43JL, TPS41JL, TPS6-likeJL, TPS33JL, TPS24JL.

[0335] The methods listed in (f) through (r) below are for the production of desired terpene product profiles for the indicated applications. Examples of enzymes that can generate all or part of the terpene product profiles for Cannabis are listed (“cs” TPS enzymes). It is understood that one of skill in the art can identify, for any given plant cultivar, TPS enzymes that are similar in sequence, structure and/or function as the indicated Cannabis TPS enzymes and can obtain specialized cultivars having similar terpene product profiles.

[0336] (f)- A method of breeding a plant for terpene dominance that changes the smell and/or therapeutic/physiologic effect In the methods listed in (f) through (r) below, it is understood that TPS enzymes that are similar in function to the indicated “Cs” (Cannabis Sativa) enzymes

[0337] (f)- A method of breeding a plant for terpene dominance that changes the smell and/or therapeutic/physiologic effect of the plant and/or extract thereof, by selecting parent cultivars to breed offspring expressing terpene synthase genes and/or products that provide such properties, e.g., one or more of the following genes and/or products:

| | |
|---|---|
| Genes: Major Product (Minor Product) | Terpene Product to Breed For: |
| CsTPS9FN | β-caryophyllene |
| CsTPS3FN, csTPS5PK, csTPS5FN, csTPS15CT, csTPS17AK, csTPS23Choc, csTPS30PK (csTPS32PK, csTPS7PK, csTPS1SK, csTPS2SK) | Myrcene |
| CsTPS31PK, csTPS37FN (csTPS32PK, csTPS24Choc, csTPS1SK) | Terpinolene |
| csTPS1SK, csTPS14CT (csTPS5FN, csTPS5PK, csTPS7FN, csTPS23Choc, csTPS30PK, csTPS32PK) | Limonene |
| CsTPS25LS (CsTPS32PK) | β-Famescene |
| csTPS2SK (csTPS1SK, csTPS5FN, csTPS30PK) | Alpha-Pinene |

[0338] (g)- A method of breeding a plant for producing an energetic effect when the plant or an extract thereof is ingested and/or vaporized (e.g., as a spray or for inhalation), by selecting parent cultivars to breed offspring expressing or not expressing terpene synthase genes and/or products that result in such properties, e.g., presence or lack thereof of one or more of the following genes and/or products:

| | |
|---|---|
| Genes: Major Product (Minor Product) | Terpene Product to Breed For: |
| CsTPS18VF (CsTPS19BL) | S-linalool |
| CsTPS31PK, csTPS37FN (csTPS32PK, csTPS24Choc, csTPS1SK) | Terpinolene |
| csTPS6PK, csTPS13PK, and csTPS38FN (csTPS7AK) | β-Ocimene |
| CsTPS2FN, csTPS5FN (CsTPS32PK | α-Pinene >> β-pinene |
| CsTPS18Choc (CsTPS19BL) | Lack of R-linalool |
| (csTPS5PK, csTPS17AK, csTPS31PK, csTPS32PK) | Lack of α-terpineol |
| | Lack of fenchol |
| csTPS37LPA5 | 3-carene |

[0339] (h)- A method of breeding a plant for producing a sedative effect when the plant or an extract thereof is ingested and/or vaporized (e.g., as a spray or for inhalation), by selecting parent cultivars to breed offspring expressing or not expressing terpene synthase genes and/or products that result in such properties, e.g., presence or lack thereof of one or more of the following genes and/or products:

| | |
|---|---|
| Genes: Major Product (Minor Product) | Terpene Product to Breed For: |
| CsTPS31PK, csTPS2SK (csTPS1SK, csTPS5FN, csTPS5PK, csTPS30PK) | β-pinene = α-Pinene (equal amounts) |
| CsTPS18Choc (CsTPS19BL) | R-linalool |
| csTPS1SK, csTPS14CT (csTPS5FN, csTPS5PK, csTPS7FN, csTPS23Choc, csTPS30PK, csTPS32PK) | Limonene |
| csTPS18VF, csTPS19BL, csTPS35LS (csTPS22PK, csTPS25LS, csTPS32PK) | Trans-nerolidol |
| (csTPS5PK, csTPS17AK, csTPS31PK, csTPS32PK) | Terpineol |
| CsTPS32PK | Camphene |
| csTPS6PK, csTPS13PK, and csTPS38FN (csTPS7AK) | Lack of β-ocimene |
| CsTPS18VF (CsTPS19BL) | Lack of S-Linalool |
| CsTPS31PK, csTPS37FN (csTPS32PK, csTPS24Choc, csTPS1SK) | Lack of Terpinolene |

[0340] (i)- A method of breeding a plant that would produce a cognitive-enhancing effect when the plant, or extract thereof, is ingested and/or vaporized by selecting parent cultivars to breed offspring expressing terpene synthase genes and/or products that provide such properties, e.g., one or more of the following genes and/or products:

| | |
|---|---|
| Genes: Major Product (Minor Product) | Terpene Product to Breed For: |
| csTPS2FN, csTPS5FN, and csTPS32PK | α-Pinene >> β-pinene |
| csTPS6PK, csTPS13PK, and csTPS38FN (csTPS7AK) | β-ocimene |
| | Eucalyptol |

[0341] (j)- A method of breeding a plant that would produce an appetite-suppressing effect when the plant, or extract thereof, is ingested and/or vaporized by selecting parent cultivars to breed offspring expressing terpene synthase genes and/or products that provide such properties, e.g., one or more of the following genes and/or products:

| | |
|---|---|
| Genes: Major Product (Minor Product) | Terpene Product to Breed For: |
| CsTPS9FN (csTPS4FN, csTPS22PK) | Humulene |

[0342] (k)- A method of breeding a plant that would produce an anti-inflammatory effect when the plant, or extract thereof, is ingested and/or vaporized by selecting parent cultivars to breed offspring expressing terpene synthase genes and/or products that provide such properties, e.g., one or more of the following genes and/or products:

| | |
|---|---|
| Genes: Major Product (Minor Product) | Terpene Product to Breed For: |
| csTPS2SK (csTPS1SK, csTPS5FN, csTPS30PK) | α-Pinene |
| CsTPS9FN (csTPS4FN, csTPS22PK) | Humulene |
| CsTPS9FN | β-caryophyllene |

[0343] (l)- A method of breeding a plant that would produce an anxiolytic (anti-anxiety) effect when the plant, or extract thereof, is ingested and/or vaporized by selecting parent cultivars to breed offspring expressing terpene synthase genes and/or products that provide such properties, e.g., one or more of the following genes and/or products:

| | |
|---|---|
| Genes: Major Product (Minor Product) | Terpene Product to Breed For: |
| csTPS2SK (csTPS1SK, csTPS5FN, csTPS30PK) | α-Pinene |
| CsTPS9FN (csTPS4FN, csTPS22PK) | Humulene |
| CsTPS9FN | β-caryophyllene |
| csTPS17AK, csTPS18VF, csTPS18Choc, csTPS19BL, csTPS29BC, csTPS35LS (csTPS31PK) | Linalool |
| csTPS18VF, csTPS19BL, csTPS35LS (csTPS22PK, csTPS25LS, csTPS32PK) | Nerolidol |
| csTPS1SK, csTPS14CT (csTPS5FN, csTPS5PK, csTPS7FN, csTPS23Choc, csTPS30PK, csTPS32PK) | Limonene |

[0344] (m)- A method of breeding a plant that would produce an antinociceptive effect when the plant, or extract thereof, is ingested and/or vaporized by selecting parent cultivars to breed offspring expressing terpene synthase genes and/or products that provide such properties, e.g., one or more of the following genes and/or products:

| | |
|---|---|
| Genes: Major Product (Minor Products) | Terpene Product to Breed For: |
| csTPS5PK (csTPS31PK, csTPS32PK) | α-bisabolol |
| (csTPS5PK, csTPS17AK, csTPS31PK, csTPS32PK) | α -terpineol |
| csTPS18VF, csTPS19BL, csTPS35LS (csTPS22PK, csTPS25LS, csTPS32PK) | trans nerolidol |
| (CsTPS2SK, csTPS32PK, TPS37LPA5) | α-phellandrene |
| | Eucalyptol |

[0345] (n)- A method of breeding a plant that would produce a body relaxing effect when the plant, or extract thereof, is ingested and/or vaporized by selecting parent cultivars to breed offspring expressing terpene synthase genes and/or products that provide such properties, e.g., one or more of the following genes and/or products:

| | |
|---|---|
| Genes: Major Product (Minor Product) | Terpene Product to Breed For: |
| csTPS5PK (csTPS31PK, csTPS32PK) | α-bisabolol |
| (csTPS5PK, csTPS17AK, csTPS31PK, csTPS32PK) | α -terpineol |
| csTPS18VF, csTPS19BL, csTPS35LS (csTPS22PK, csTPS25LS, csTPS32PK) | trans nerolidol |
| (CsTPS2SK, csTPS32PK, TPS37LPA5) | α-phellandrene |

[0346] (o)- A method of breeding a plant that would produce an anti-depressant effect when the plant, or extract thereof, is ingested and/or vaporized by selecting parent cultivars to breed offspring expressing terpene synthase genes and/or products that provide such properties, e.g., one or more of the following genes and/or products:

| | |
|---|---|
| Genes: Major Product (Minor Product) | Terpene Product to Breed For: |
| CsTPS31PK, csTPS2SK (csTPS1SK, csTPS5FN, csTPS5PK, csTPS30PK) | b-pinene = a-Pinene |
| csTPS1SK, csTPS14CT (csTPS5FN, csTPS5PK, csTPS7FN, csTPS23Choc, csTPS30PK, csTPS32PK) | Limonene |
| csTPS18VF, csTPS19BL, csTPS35LS (csTPS22PK, csTPS25LS, csTPS32PK) | nerolidol |
| csTPS17AK, csTPS18VF, csTPS18Choc, csTPS19BL, csTPS29BC, csTPS35LS (csTPS31PK) | Linalool |

[0347] (p)- A method of breeding a plant that contains acetyl cholinesterase-inhibitor (AChEI) terpenes by selecting parent cultivars to breed offspring expressing terpene synthase genes and/or products that provide such properties, e.g., one or more of the following genes and/or products:

| | |
|---|---|
| Genes: Major Product (Minor Product) | Terpene Product to Breed For: |
| csTPS2SK (csTPS1SK, csTPS5FN, csTPS30PK) | α-pinene |
| CsTPS31PK, csTPS37FN (csTPS32PK, csTPS24Choc, csTPS1SK) | Terpinolene |
| csTPS6PK, csTPS13PK, and csTPS38FN (csTPS7AK) | β-ocimene |
| TPS37LPA5 | (3-Carene) |
| csTPS33PK and TPS37LPA5 | α- and γ-terpinene |
| (csTPS5FN, csTPS7FN, csTPS30PK) | Sabinene |

[0348] (q)- A method of breeding a plant that contain one or more of the Herbivore-induced Plant Volatiles (HIPV) terpene synthases (see, e.g., Booth et al., Plant Physiol., 184(1):130-147 (2020), the contents of which are incorporated in their entirety by reference herein), by selecting parent cultivars to breed offspring expressing terpene synthase genes and/or products that provide such properties, e.g., one or more of the following genes and/or products:

| | |
|---|---|
| Genes: Major Product (Minor Product) | Terpene Product to Breed For: |
| csTPS6PK, csTPS13PK, csTPS38FN (csTPS7AK) | Ocimene |
| csTPS17AK, csTPS18VF, csTPS18Choc, csTPS19BL, csTPS29BC, csTPS35LS (csTPS31PK) | Linalool |
| csTPS5PK (csTPS31 PK, csTPS32PK) | Bisabolol |
| csTPS18VF, csTPS19BL, csTPS35LS (csTPS22PK, csTPS25LS, csTPS32PK) | Nerolidol |
| csTPS2SK (csTPS1SK, csTPS5FN, csTPS30PK) | α-pinene |
| (csTPS2SK, csTPS1SK, csTPS5FN, csTPS5PK, csTPS30PK) | β-pinene |
| csTPS1SK, csTPS14CT (csTPS5FN, csTPS5PK, csTPS7FN, csTPS23Choc, csTPS30PK, csTPS32PK) | Limonene |
| (csTPS5PK, csTPS17AK, csTPS31PK, csTPS32PK) | α-terpineol |
| (csTPS5PK, csTPS17AK, csTPS31PK, csTPS32PK) | Y-elemene |
| (csTPS5PK, csTPS31PK, csTPS32PK) | Bergamotene |
| (csTPSBFN, csTPS16CC, csTPS22PK, csTPS28PK) | Eudesmol |
| csTPS16CC | Germacrene B |
| N/A | Guiaol |
| (csTPS5PK, csTPS17AK, csTPS31PK, csTPS32PK) | Fenchol |
| N/A | Eugenol |

[0349] (r)- A method of breeding a plant that produces, in the plant or in an extract thereof, one or more of the following properties by selecting parent cultivars to breed offspring expressing terpene synthase genes and/or products that provide such properties, e.g., one or more of the following genes and/or gene products:

Antibacterial Properties:

| | |
|---|---|
| Genes: Major Product (Minor Product) | Terpene Product to Breed For: |
| CsTPS4FN | Aromadendrene |
| | Carvacrol |
| csTPS9FN | β-Caryophyllene |
| TPS-b and/or other | Eucalyptol (1,8-Cineole) |
| TPS-b and/or other | Fenchol |
| csTPS16CC | Germacrene D |
| CsTPS32PK (CsTPS17AK) | Nerol (cis-Geraniol) |
| TPS-b and/or other | Pulegone |
| (csTPS5FN, csTPS7FN, csTPS30PK) | Sabinene |
| CsTPS32PK (CsTPS17AK) | Geraniol |

Antimicrobial Properties:

| | |
|---|---|
| Genes: Major Product (Minor Product) | Terpene Product to Breed For: |
| (CsTPS32PK) | Camphor |
| (csTPS30PK, CsTPS7FN) | Sabinene Hydrate |
| csTPS33PK | Thymol |

Fungicidal Properties:

| | |
|---|---|
| Genes: Major Product (Minor Product) | Terpene Product to Breed For: |
| (CsTPS35PK) | Citronellol |
| csTPS33PK | para-Cymene |
| TPS-b and/or other | Pulegone |
| CsTPS32PK | Geraniol |

Herbicidal Properties:

| | |
|---|---|
| Genes: Major Product (Minor Product) | Terpene Product to Breed For: |
| CsTPS32PK | Geraniol |
| TPS-b and/or other | Pulegone |
| (CsTPS35PK) | Citronellol |
| TPS-b and/or other | Borneol |
| csTPS33PK | para-Cymene |

Pesticidal Properties:

| | |
|---|---|
| Genes: Major Product (Minor Product) | Terpene Product to Breed For: |
| CsTPS4FN - TPS9-like2JL, TPS4-likeJL | Aromadendrene |
| CsTPS5PK (CsTPS32PK - TPS5JL) | α-Bisabolol |
| TPS-a | Cedrol |
| CsTPS18VF, csTPS19BL, csTPS35LS, (csTPS22PK, csTPS25LS, csTPS32PK) | Nerolidol |
| CsTPS18VF, csTPS19BL, csTPS35LS, (csTPS22PK, csTPS25LS, csTPS32PK) | trans-Nerolidol |
| TPS-a | Guaiol |

[0350] Pheromone: Insect attractant (e.g., for pollination; to attract insects that are predators of other insects or other pathogens that cause plant damage) or insecticidal (e.g., contact or fumigant toxicities)

| | |
|---|---|
| Genes: Major Product (Minor Product) | Terpene Product to Breed For: |
| | endo-Borneol |
| | Isoborneol |
| TPS37LPA5 | (3-Carene) |
| | Carveol |
| csTPS16CC | Germacrene B |
| CsTPS21AK | Hedycaryol |
| | Menthol |
| CsTPS18VF, csTPS19BL, csTPS35LS, (csTPS22PK, csTPS25LS, csTPS32PK) | cis-Nerolidol |
| CsTPS6FN, csTPS13PK, csTPS38FN, (csTPS17AK) | cis-β-Ocimene |
| CsTPS6FN, csTPS13PK, csTPS38FN, (csTPS17AK) | trans-β-Ocimene |
| (csTPS30PK, CsTPS7FN) | Sabinene Hydrate |
| csTPS33PK and TPS37LPA5 | α-Terpinen |
| csTPS33PK | Thymol |
| CsTPS25LS (CsTPS32PK) | β-Famosene |
| CsTPS25LS | α-Farnesene |
| CsTPS8FN, (csTPS16CC, csTPS22PK, csTPS28PK) | γ-Eudesmol |
| CsTPS4FN | Alloaromadendrene |
| (CsTPS8FN, csTPS4FN) | Valencene |
| TPS-b and/or other | Pulegone |

Expectorant Properties:

| | |
|---|---|
| Genes: Major Product (Minor Product) | Terpene Product to Breed For: |
| CsTPS32PK | Camphene |
| CsTPS32PK | Geraniol |
| (csTPS30PK, CsTPS7FN) | Sabinene Hydrate |

[0351] Non-irritant properties: (Breed for reduced production or absence of, e.g., one or more of the following terpene products that are irritants, which can be useful, e.g., when breeding plants such as Cannabis for dermatological uses in salves, creams, ointment and transdermal applications)

| | |
|---|---|
| Genes: Major Product (Minor Product) | Terpene Product to Breed for Absence/Reduced Amount: |
| TPS-b and/or other | Borneol |
| | α-Cedrene |
| (CsTPS35PK) | Citronellol |
| csTPS33PK | para-Cymene |
| | Fenchone (Presence - Counterirritant) |

[0352] The methods provided herein can, in certain aspects, be used to identify plant genotypes, e.g., Cannabis cultivar genotypes, that produce greater HIPV terpene concentrations in response to a pest or pathogen, or in response to one or more signals emitted by a companion Cannabis cultivar, or in response to one or more signals emitted by a plant cultivar of a species other than Cannabis. It is understood by those of skill in the art that when breeding for certain TPS genes, the presence of a certain gene does not mean that it will always be expressed or produce a measurable product in a flower until it is triggered to express such gene and/or produce a product that is a direct or indirect result of the expression of the gene. This includes, for example, the production of a higher concentration of one or more HIPV terpene concentrations when a threshold pest or pathogen pressure is applied, which then induces the expression of the one or more HIPV terpenes. In addition, variants of the TPS family can have a greater or lesser response to these pest or pathogen pressures, which can be identified by barcoding as provided herein, since the barcode of a TPS gene variant can be indicative of the greater or lesser expression response to a given pest or pathogen.

[0353] Similarly, the production of a higher concentration of one or more HIPV terpene concentrations in response to one or more external signals produced by one or more companion Cannabis plants or by one or more companion plants of a species other than Cannabis can be dependent on a threshold signal, which then induces the expression of the one or more HIPV terpenes. In addition, variants of the TPS family can have a greater or lesser response to these external signals, which can be identified by barcoding as provided herein, since the barcode of a TPS gene variant can be indicative of the greater or lesser expression response to a given pest. This also includes, for example, the production of a higher concentration of one or more HIPV terpene concentrations when one or more external signals from a companion Cannabis species or other species of plant is applied, which then induces the expression of the one or more HIPV terpenes. In addition, variants of the TPS family can have a greater or lesser response to these external signals, which can be identified by barcoding as provided herein, since the barcode of a TPS gene variant can be indicative of the greater or lesser expression response to an external signal from a companion plant.

[0354] In aspects, provided herein are methods of identifying plant cultivars containing terpene synthase gene profiles that result in the expression of terpenoids associated with oviposition deterrence (deter an insect that is a pest from laying eggs on the plant), fumigant insect repellent activity, contact toxicity and/or insect herbivore predator attractant. In certain aspects, the insect oviposition deterrent is selected from among one or more of linalool, α-bisabolol, and trans-neridol or any combinations thereof. In aspects, the contact insecticide is guaiol. In aspects, the fumigant insect repellent is selected from among β-ocimene, α-bisabololor a combination thereof.

[0355] In certain aspects, provided herein are methods of breeding plants that produce terpenoids associated with oviposition deterrence, insect fumigant activity, contact toxicity and/or an insect herbivore predator attractant. In aspects, the breeding comprises creating a plant with an oviposition deterrence profile by crossing a plant that produces an amount of trans-nerolidiol that is at or above a threshold amount with a plant that produces an amount of α-bisabololthat is at or above a threshold amount. In aspects, the breeding comprises creating a plant with an insect fumigant terpene profile by crossing a plant that produces an amount of α-bisabololthat is at or above a threshold amount with a plant that produces β-ocimene in an amount that is at or above a threshold amount. In certain aspects, the breeding comprises creating a plant with both oviposition deterrence and insect fumigant terpene profiles by crossing a plant that produces an amount of α-bisabolol and β-ocimene that is at or above a threshold amount with a plant that produces trans-nerolidiol in an amount that is at or above a threshold amount.

[0356] In certain aspects, the methods provided herein can be used to amplify the entire coding sequence of a TPS gene for analyzing, e.g., its homology to other TPS gene sequences by sequencing and/or restriction digest analysis, its terpene production (e.g., in vitro) and/or for transgenic cloning to functionally characterize the gene and/or to create variant cultivars having a desired terpene synthase gene expression profile. For example, amplicons of a TPS gene can be generated using a forward primer closest to the 5′ end of the gene, and a reverse primer closest to the 3′ end of the gene that could amplify the full transcript gene sequence from a given plant cultivar’s gDNA, or cDNA library. The resulting amplicons could be subject to any genotyping application such as HRM, sequencing, microarray analysis, restriction enzyme digestion, or other common genotyping methods.

[0357] In aspects, the TPS gene of interest can be inserted into a cloning vector for expression in a compatible host cell. A large number of vector-host systems known in the art can be used. Possible vectors include, but are not limited to, plasmids or modified viruses. Such vectors include, but are not limited to, bacteriophages such as lambda derivatives, or plasmids such as pCMV4, pBR322 or pUC plasmid derivatives or the Bluescript vector (Stratagene, La Jolla, CA). Other expression vectors include the HZ24 expression vector exemplified herein (see e.g., SEQ ID NOS:4 and 5). The insertion into a cloning vector can, for example, be accomplished by ligating the DNA fragment into a cloning vector which has complementary cohesive termini. Insertion can be effected using TOPO cloning vectors (Invitrogen, Carlsbad, CA). Prokaryotic and eukaryotic host cells can be used to express a gene contained in a vector. Such cells include bacterial cells, yeast cells, fungal cells, Archea, plant cells, insect cells and animal cells. These include but are not limited to mammalian cell systems infected with virus (e.g., vaccinia virus, adenovirus and other viruses); insect cell systems infected with virus (e.g., baculovirus); microorganisms such as yeast containing yeast vectors; or bacteria transformed with bacteriophage, DNA, plasmid DNA, or cosmid DNA.

[0358] The host cells are used to produce a protein encoded by the TPS gene or by a vector containing the gene by growing them under conditions whereby the encoded protein is expressed by the cell. The encoded TPS enzyme can be studied/manipualted in the host cell, or can be recovered from the cell by proteoin isolation and purification methods known to those of skill in the art. In aspects, the host-nucleic acid (vector or gene) system can be enginnered, by methods known to those of skill in the art, to secrete the TPS enzyme into the medium.

[0359] In aspects, the TPS gene is involved in the production of terpinolene. In aspects, the primers are as shown below:

Terpinolene - csTPS37FN full mRNA cloning primers (including signal peptide sequences)

| | Sequence (5′->3′) | Template strand | Length | Start | Stop | Tm | GC % | Self complem entarity | Self 3′ complem entarity |
|---|---|---|---|---|---|---|---|---|---|
| Forward primer | ATGCAGTGCATGGCT TTTC (SEQ ID NO:1328) | Plus | 19 | 1 | 19 | 57.17 | 47.37 | 9.00 | 0.00 |
| Reverse primer | TTACATGGGAATAGG GTTAATAATCAAATC (SEQ ID NO:1329) | Minus | 30 | 1920 | 1891 | 58.38 | 30.00 | 5.00 | 3.00 |
| Product length | 1920 | | | | | | | | |

[0360] In certain aspects, the TPS genes are selected from among the following: 1) TPS9 LPA4 type, 2) TPS9 LPA21.3 type, 3) TPS37 Cleaved (lacking the signal peptide, i.e., does not encode the chloroplast import signal), 4) TPS16CC, and 5) TPS20CT, and the primers are as follows:

Beta-Caryophyllene and Humulene - TPS9L21 (TPS9 LPA21.3)

| | Sequence (5′->3′) | Template strand | Length | Start | Stop | Tm | GC % | Self complem entarity | Self 3′ complem entarity |
|---|---|---|---|---|---|---|---|---|---|
| Forward primer | AT GTC ATA TCA AGT TTT AGC (SEQ ID NO:1330) | Plus | 20 | 1 | 20 | 48.75 | 30.00 | 5.00 | 2.00 |
| Reverse primer | TGG GAT TTG ATC TAT AAG TAA CG (SEQ ID NO:1331) | Minus | 23 | 1668 | 1646 | 53.76 | 34.78 | 4.00 | 2.00 |
| Product length | 1668 | | | | | | | | |

Beta-Caryophyllene and Humulene - TPS9L4 (TPS9 LPA4)

| | Sequence (5′->3′) | Template strand | Length | Start | Stop | Tm | GC % | Self complem entarity | Self 3′ complem entarity |
|---|---|---|---|---|---|---|---|---|---|
| Forward primer | AT GTC ATA TCA AGT TTT AGC (SEQ ID NO:1330) | Plus | 20 | 1 | 20 | 48.75 | 30.00 | 5.00 | 2.00 |
| Reverse primer | CGG GAT TTG ATC TAT AAG TAA CG (SEQ ID NO:1332) | Minus | 23 | 1668 | 1646 | 54.82 | 39.13 | 4.00 | 2.00 |
| Product length | 1668 | | | | | | | | |

Germacrene B / gamma-eudesmol - TPS16CC

| | Sequence (5′->3′) | Template strand | Length | Start | Stop | Tm | GC % | Self complem entarity | Self 3′ complem entarity |
|---|---|---|---|---|---|---|---|---|---|
| Forward primer | AT GTC TAG TCA AGT GTT AGC (SEQ ID NO:1333) | Plus | 20 | 1 | 20 | 52.37 | 40.00 | 6.00 | 2.00 |
| Reverse primer | TAA TGG GAT GGG ATC TAT AAG C (SEQ ID NO:1334) | Minus | 22 | 1713 | 1692 | 54.59 | 40.91 | 4.00 | 2.00 |
| Product length | 1713 | | | | | | | | |

Hedycaryol - CsTPS20CT

| | Sequence (5′->3′) | Template strand | Length | Start | Stop | Tm | GC % | Self complem entarity | Self 3′ complem entarity |
|---|---|---|---|---|---|---|---|---|---|
| Forward primer | AT GTC AAA TAT TCA AGT CTT AGC (SEQ ID NO:1335) | Plus | 23 | 1 | 23 | 52.90 | 30.43 | 6.00 | 2.00 |
| Reverse primer | TAA TGG GAT GGG ATC TAT AAG C (SEQ ID NO:1336) | Minus | 26 | 1653 | 1628 | 55.68 | 30.77 | 7.00 | 0.00 |
| Product length | 1653 | | | | | | | | |

Terpinolene - csTPS37FN coding primers (cleaved; does not include signal peptide sequences)

| | Sequence (5′->3′) | Template strand | Length | Start | Stop | Tm | GC % | Self complem entarity | Self 3′ complem entarity |
|---|---|---|---|---|---|---|---|---|---|
| Forward primer | ACT GTG GTC GAT AAC CCT AGT TC (SEQ ID NO:1337) | Plus | 23 | 184 | 206 | 59.55 | 47.83 | 4.00 | 0.00 |
| Reverse primer | CAT GGG AAT AGG GTT AAT AAT CAA ATC (SEQ ID NO:1338) | Minus | 27 | 1917 | 1891 | 56.63 | 33.33 | 5.00 | 3.00 |
| Product length | 1734 | | | | | | | | |

[0361] In embodiments, the above-mentioned primers can be adapted for use in commercial cloning, expression and/or amplification kits. For example, if a directional cloning/amplification/expression system is performed, such as TOPO directional cloning/amplification/expression (Thermofisher Scientific, USA), using one or more of the above-mentioned sets of primers, a 5′ CACC 3′ sequence can be attached on the 5′ end of any of the forward primera to allow for an overhang to be created during the process of PCR, which then allows for subsequent cloning/amplification/expression protocols to be carried out. In embodiments, the 5′CACC3′ tag can be interchanged with overhang sequences designated by kits other than the TOPO kit, to accomplish the same goal of functional characterization. In embodiments, introduction of an artificial start codon (ATG) at the 5′ end of a forward primer can permit the coding mRNA sequence to be expressed and properly folded in a bacterial or non-eukaryotic expression system. In embodiments, the ATG start codon is added to the 5′ end of the primer of SEQ ID NO:1337.

[0362] Energetic Terpene Profile Methods:

[0363] A method (to increase/to select for) bioaccumulation of at least one of the following terpenes: terpinolene, (Z)/(E)-β-ocimene, α-pinene, 3-carene and S-Linalool and decreased bioaccumulation/absence of R-linalool through gene selection and genotyping.
[0364] Where α-pineneis greater than β-pinene through selection of at least one of the following genes CsTPS2SK, (csTPS5FN, csTPS30PKand CsTPS32PK) using at least one forward & reverse primer combination from primer groups 1, 2, 3, and 4, respectively and a gel-based, HRM, qPCR, RT-qPCR, restriction enzyme digestion, or sequencing endpoint.
[0365] Where (Z)/(E)-β-ocimene bioaccumulation is increased through selection of at least one of the following genes csTPS6FN, csTPS13PK, and csTPS38FN using at least one forward & reverse primer combination from primer groups 12, 13, and 14 respectively and a gel-based, HRM, qPCR, RT-qPCR, restriction enzyme digestion, or sequencing endpoint.
[0366] Where terpinolene bioaccumulation is increased through selection of at least one of the following genes CsTPS31 PK and CsTPS37FN using at least one forward & reverse primer combination from primer groups 5 and 6, respectively and a gel-based, HRM, qPCR, RT-qPCR, restriction enzyme digestion, or sequencing endpoint.
[0367] Where 3-carene bioaccumulation is increased through selection of CsTPS37FN and/or CsTPS37LPA5 using at least one forward & reverse primer combination from primer group 6 and a gel-based, HRM, qPCR, RT-qPCR, restriction enzyme digestion, or sequencing endpoint.
[0368] Where terpinene (alpha- and/or gamma-) bioaccumulation is increased through selection of the following gene, csTPS33PK and/or TPS37LPA5 using at least one forward & reverse primer combination from primer group 19, and a gel-based, HRM, qPCR, RT-qPCR, restriction enzyme digestion, or sequencing endpoint.
[0369] Where S-Linalool bioaccumulation is increased through selection of at least one of the following genes CsTPS18VF using at least one forward & reverse primer combination from primer group 9, and a gel-based, HRM, qPCR, RT-qPCR, restriction enzyme digestion, or sequencing endpoint.
[0370] Where the absence of R-linalool is achieved through selection for absence or non-functional genotypes of CsTPS18Choc using at least one forward & reverse primer combination from primer group 7 and a gel-based, HRM, qPCR, RT-qPCR, restriction enzyme digestion, or sequencing endpoint.

[0371] A Method of Breeding Plants Through Selecting Parental Lines and/or Offspring:
[0372] Where the parental line and/or offspring is selected through selection of the presence/absence of 1 or more terpene synthase genes to produce a terpene profile with a given effect and where the selection of more than one gene that produces the same terpene product increases the % of the terpene fraction that is the intended terpene.
   [0373] Specifically, where the terpene synthase gene encoding an alpha-pinene:beta-pinene ratigreater than 1:1 is selected via PCR using primer groups 1, 2, 3, and/or 4 that is crossed ta plant containing high in terpinolene selected via PCR using primer groups 5, and/or 6 tproduce a more energetic terpene profile than produced by either parental line containing 1 of the 2 TPS genes.
   [0374] Specifically, where the terpene synthase gene encoding an alpha-pinene:beta-pinene ratigreater than 1:1 is selected via PCR using primer groups 1, 2, 3, and/or 4 that is crossed ta plant containing high in beta-ocimene selected via PCR using primer groups 12, 13, and/or 14 tproduce a more energetic terpene profile than produced by either parental line containing 1 of the 2 TPS genes.
   [0375] Specifically, where the terpene synthase gene encoding an S-linalool production is selected via PCR using primer group 9 that is crossed ta plant containing high in beta-ocimene selected via PCR using primer groups 12, 13, and/or 14 tproduce a more energetic terpene profile than produced by either parental line containing 1 of the 2 TPS genes.
   [0376] Specifically, where the terpene synthase gene encoding an alpha-pinene:beta-pinene ratigreater than 1:1 is selected via PCR using primer groups 1, 2, 3, and/or 4 that is crossed ta plant containing high in beta-ocimene and/or terpinolene that is selected via PCR using primer groups 12, 13, and/or 14 and/or primer groups 5 and/or 6 respectively tproduce offspring with a combination of three terpenes that produce a greater energetic terpene profile than either parent containing 1-2 of the 3 TPS genes.
      [0377] This can be expanded to any combination of the 4-6 terpenes (terpinolene, trans-nerolidol, alpha-pinene/beta-pinene, and presence of S-linalool/absence of R-linalool) that can produce a combination effect that can be more effective than selecting for a single terpene.
      [0378] Similarly, having multiple versions of a given terpene synthase allows for a greater bioaccumulation/% of the terpene fraction to be a given terpene. (l.e. selecting primer groups 5 and 6 for terpinolene can produce a higher % of the terpene fraction as terpinolene than selecting 5 or 6 alone.
         [0379] An effective combination can have multiple synthases selected for or against each of the 4-6 terpenes listed above.

[0380] Anti-Nociceptive/Pain-Relieving Terpene Profile Methods:

[0381] A method to increase bioaccumulation of at least one of the following terpenes: a-bisabolol, a-terpineol, trans-nerolidol, and a-phellandrene through gene selection and genotyping.
[0382] Where a-bisabolol bioaccumulation is increased through selection of at least one of the following genes csTPS5PK (csTPS31 PK, csTPS32PK) using at least one forward & reverse primer combination from primer groups 8 (Groups 5 and 4) and a gel-based, HRM, qPCR, RT-qPCR, restriction enzyme digestion, or sequencing endpoint.
[0383] Where a-terpineol bioaccumulation is increased through selection of at least one of the following genes (csTPS5PK, csTPS31 PK, csTPS32PK) using at least one forward & reverse primer combination from primer groups 8, 5, and 4, respectively, and a gel-based, HRM, qPCR, RT-qPCR, restriction enzyme digestion, or sequencing endpoint.
[0384] Where trans-nerolidol bioaccumulation is increased through selection of at least one of the following genes csTPS18VF, csTPS19BL, and csTPS35LS using at least one forward & reverse primer combination from primer groups 9, 10, and 11, respectively, and a gel-based, HRM, qPCR, RT-qPCR, restriction enzyme digestion, or sequencing endpoint.
[0385] Where a-phellandrene bioaccumulation is increased through selection of at least one of the following genes (CsTPS2SK, csTPS32PK, TPS37LPA5) using primer groups 1, 4 and 6, respectively, and a gel-based, HRM, restriction enzyme, or sequencing endpoint.

[0386] A Method of Breeding Plants Through Selecting Parental Lines and/or Offspring:
[0387] Where the parental line and/or offspring is selected through selection of the presence of 1 or more terpene synthase genes to produce a terpene profile with a given effect and where the selection of more than one gene that produces the same terpene product increases the % of the terpene fraction that is the intended terpene.
   [0388] Specifically, where the terpene synthase gene encoding trans-nerolidol production is selected via PCR using primer groups 9, 10, and/or 11 that is crossed ta plant containing high in alpha-bisabolol selected via PCR using primer groups 4, 5, and/or 8 tproduce a more anti-nociceptive terpene profile than produced by either parental line containing 1 of the 2 TPS genes.
   [0389] Specifically, where the terpene synthase gene encoding alpha-phellandrene production is selected via PCR using primer groups 1 and/or 4 and/or 6 that is crossed ta plant containing high in alpha-bisabolol that is selected via PCR using primer groups 4, 5, and/or 8 tproduce a more anti-nociceptive terpene profile than produced by either parental line containing 1 of the 2 TPS genes.
   [0390] Specifically, where the terpene synthase gene encoding trans-nerolidol production is selected via PCR using primer groups 9, 10, and/or 11 that is crossed ta plant containing high in alpha-terpineol and/or alpha-bisabolol that is selected via PCR using primer groups 4, 5, and or 8 and/or 4, 5, and/or 6, respectively tproduce offspring with a combination of three terpenes that produce a greater anti-nociceptive terpene profile than either parent containing 1-2 genes of the 3 TPS genes.
      [0391] This can be expanded to any combination of the 4 terpenes (alpha-bisabolol, trans-nerolidol, alpha-phellandrene, and alpha-terpineol) that can produce a combination effect that can be more effective than selecting for a single terpene.
      [0392] Similarly, having multiple versions of a given terpene synthase allows for a greater bioaccumulation/% of the terpene fraction to be a given terpene. (l.e. selecting primer groups 4 and 6 for alpha-bisabolol can produce a higher % of the terpene fraction as alpha-bisbolol than selecting 4 or 6 alone.
         [0393] An effective combination can have multiple synthases selected for each of the 4 terpenes listed above.

[0394] A Method to Identify and Breed Cannabis/Hemp Plant Genotypes Containing Terpenoids that are Insecticidal and/or Attractants of certain predator or beneficial organisms, where the Terpenoids are Associated with Oviposition Deterrence, Insect Fumigant Activity, Contact Toxicity, And Insect Herbivore Predator Attractant.
[0395] Where the starting plant contains the contact insecticide Guiaol or is selected for by using at least one forward & reverse primer combination from primer group 16, and a gel-based, HRM, qPCR, RT-qPCR, restriction enzyme digestion, or sequencing endpoint.
[0396] Where the starting plant contains the insecticide 3-carene or is selected for by using at least one forward & reverse primer combination from primer group 6, and a gel-based, HRM, qPCR, RT-qPCR, restriction enzyme digestion, or sequencing endpoint
[0397] ● Where the insect oviposition deterrent is linalool selected for by using at least one of the following genes csTPS18VF, csTPS19BL, csTPS35LS, csTPS18Choc, csTPS29BC, and/or csTPS17AK using at least one forward & reverse primer combination from primer groups 9, 10, 11, 7, 17 and 18, respectively, and a gel-based, HRM, qPCR, RT-qPCR, restriction enzyme digestion, or sequencing endpoint.
[0398] Where the herbivore predator attractant is β-Famescene selected for by using at least one of the following genes csTPS32PK and/or csTPS25LS using at least one forward & reverse primer combination from primer groups 4 and 15 respectively, and a gel-based, HRM, qPCR, RT-qPCR, restriction enzyme digestion, or sequencing endpoint.
[0399] Where the fumigant insect repellent is beta ocimene selected for by using at least one of the following genes csTPS6FN, csTPS13PK, and csTPS38FN using at least one forward & reverse primer combination from primer groups 12, 13, and 14 respectively, and a gel-based, HRM, qPCR, RT-qPCR, restriction enzyme digestion, or sequencing endpoint.
[0400] Where the oviposition deterrent is trans nerolidol selected for by using at least one of the following genes csTPS18VF, csTPS19BL, and csTPS35LS using at least one forward & reverse primer combination from primer groups 9, 10, and 11, respectively, and a gel-based, HRM, qPCR, RT-qPCR, restriction enzyme digestion, or sequencing endpoint.
   [0401] Wherein trans nerolidol impairs an insect’s neural function
[0402] Where the insect fumigant is alpha bisabolol selected for by using at least one of the following genes csTPS5PK (csTPS31 PK, csTPS32PK) using at least one forward & reverse primer combination from primer group 8 (Groups 5 and 4) respectively, and a gel-based, HRM, qPCR, RT-qPCR, restriction enzyme digestion, or sequencing endpoint.
[0403] Where the oviposition deterrent is alpha bisabolol selected for by using at least one of the following genes csTPS5PK (csTPS31 PK, csTPS32PK) using at least one forward & reverse primer combination from primer group 8 (Groups 5 and 4) respectively, and a gel-based, HRM, qPCR, RT-qPCR, restriction enzyme digestion, or sequencing endpoint.
[0404] Where the oviposition deterrent is a-terpineol selected for by using at least one of the following genes (csTPS5PK, csTPS31 PK, csTPS32PK) using at least one forward & reverse primer combination from primer groups 8, 5, and 4, respectively, and a gel-based, HRM, qPCR, RT-qPCR, restriction enzyme digestion, or sequencing endpoint.

[0405] A Method of Breeding Plants Through Selecting Parental Lines and/or Offspring:
[0406] Where the parental line and/or offspring is selected through selection of the presence of 1 or more terpene synthase genes to produce a terpene profile with a given effect and where the selection of more than one gene that produces the same terpene product increases the % of the terpene fraction that is the intended terpene.
   [0407] Specifically, where the terpene synthase gene encoding trans-nerolidol production is selected via PCR using primer groups 9, 10, and/or 11 that is crossed to a plant containing high in alpha-bisabolol that is selected via PCR using primer groups 4, 5, and/or 8 to produce an oviposition deterrence terpene profile.
   [0408] Specifically, where the terpene synthase gene encoding alpha-bisabolol production is selected via PCR using primer groups 4, 5, and/or 6 that is crossed to a plant containing high in beta-ocimene that is selected via PCR using primer groups 12, 13, and/or 14 to produce offspring with a combination of an insect fumigant and oviposition deterrence terpene profile.
   [0409] Specifically, where a plant with the greatest oviposition deterrence is produced through selecting for the terpene synthase genes encoding a-terpineol (primer groups 4, 5, and 8), alpha bisabolol (primer groups 4, 5, and 8), and linalool (primer groups 9, 10, 11, 7, 17 and 18) to be present via PCR using the respective primer groups for those terpene synthase genes.
   [0410] Specifically, where the terpene synthase gene encoding trans-nerolidol production is selected via PCR using primer groups 9, 10, and/or 11 that is crossed to a plant containing high in beta-ocimene and/or alpha-bisabolol that is selected via PCR using primer groups 12, 13, and/or 14 and/or 4, 5, and/or 6, respectively to produce offspring with a combination of an insect fumigant and oviposition deterrence terpene profile.
      [0411] This can be expanded to any combination of the 5 terpenes (alpha-bisabolol, trans-nerolidol, beta-ocimene, guaiol, and beta-farnescene) that can produce a combination effect that can be more effective than selecting for a single terpene.
      [0412] Similarly, having multiple versions of a given terpene synthase allows for a greater bioaccumulation/% of the terpene fraction to be a given terpene. (l.e. selecting primer groups 9, 10, and 11 for trans-nerolidol can produce a higher % of the terpene fraction as trans-nerolidol than selecting 9, 10, or 11 alone.
         [0413] An effective combination can have multiple synthases selected for each of the 5 terpenes listed above.

[0414] In embodiments, the terpene synthase genes that produce an insecticidal profile produce at least one terpene that acts as a neuromodulator that can paralyze and/or kill insects, e.g., by one or more of binding to octopamine receptors, inhibiting AChE (acetylcholine esterase) and modulating GABA.A.

### Octopamine Receptors

[0415] In aspects, the compositions and methods provided herein are for identifying/selecting plants that express at least one terpene synthase that produces at least one terpene that binds to an octopamine receptor. In aspects, binding of the at least one terpene to an octopamine receptor can exert an insecticidal effect, i.e., the plant identified and/or selected, e.g., for cultivating and/or breeding has an insecticidal TPS/terpene profile. Octopamine receptors (octopamine receptors) govern insect neural function. The structure of octopamine is similar to epinephrine and norepinephrine; in insects, octopamine operates analogously to epinephrine and norepinephrine in the vertebrates. Vertebrates do not appear to have octopamine receptors. Octopamine is found is much higher concentrations in the insect nervous system than in mammals. Binding to octopamine receptors can cause neural excitation that can include behavioral modification in invertebrates, including insects, such as a lack of desire to eat, or to reproduce. The oviposition deterrence observed for mono and sesquiterpene alcohols can, in aspects, be mediated through binding to octopamine receptors. Without being bound by theory, octopamine is an aromatic(ring) amine diol, so oviposition deterrent terpenes may mediate their activity by either a secondary or tertiary alcohol functional group, e.g., of tertiary substituted mono and sesquiterpene alcohols (including α-bisabolol, eugenol). Insect repellent and oviposition deterrence function can be caused by modulation of the octopamine receptor by terpenes in Cannabis (alpha bisabolol, alpha terpineol, linalool, trans nerolidol, guiaol) with tertiary alcohol structure (low polarity OH group) that can modulate the octopamine receptor which controls many neural functions like behavior, etc. Monoterpene octopamine modulators can include, but are not limited to, all tertiary substituted terpene alcohols, tertiary substituted monoterpenes such as alpha terpineol, eugenol, geraniol, and linalool, and tertiary substituted sesquiterpene alcohols such as t-nerolidol, a bisabolol, and guiaol.

### Acetylcholine Esterase (AChE) Inhibition

[0416] In aspects, the compositions and methods provided herein are for identifying/selecting plants that express at least one terpene synthase that produces at least one terpene that inhibits acetylcholine esterase. In aspects, inhibition of actylcholine esterase can exert an insecticidal effect, i.e., the plant identified and/or selected, e.g., for cultivating and/or breeding has an insecticidal TPS/terpene profile. In aspects, inhibition of actylcholine esterase can improve cognitive function in a subject, e.g., a human subject.

[0417] The AChE enzyme can, in aspects, serve as an insect-specific insecticidal target (or a human-specific target to improve cognitive function) because the insect AChE enzyme differs from the human enzyme by one amino acid residue. “Dual binding site” terpene inhibitors can interact with the AChE at both the catalytic site and at peripheral site(s); thus, they can act both as competitive and uncompetitive inhibitors. In aspects, AChEl (acetylcholinesterase inhibition) can be improved using pairs of terpenes, or groups of terpenes, that bind uncompetitively at two sites of the AChE enzyme (e.g., alpha pinene at the active site and beta pinene at a peripheral site). Alternately, in aspects, a poor competitive binder can reduce the binding and AChEl by an active site binder, or can block active site binders at the peripheral site (“entourage effects” between terpenes). The size, dimension and/or functional groups of the terpenes can all play a role in the efficacy of AChEl. AChEl function can, in aspects, be improved by a synergistic effect (entourage effect) involving catalytic and peripheral noncompetitive inhibition; in aspects, the strong AChEl effects of some terpenes can be modulated by competitive binding of low AChEl terpenes. Examples of terpenes that exhibit AChEl effects are described in Jankowska et al., Molecules, 23(34):1-20

[0418] , the contents of which are expressly incorporated by reference herein. Certain examples include, but are not limited to, α-pinene, β-pinene, eugenol, isoeugenol, ocimene, pulegon, α-terpinene, α-terpineoland Terpinen-4-ol.

### GABA Receptor Modulation

[0419] In aspects, the compositions and methods provided herein are for identifying/selecting plants that express at least one terpene synthase that produces at least one terpene that is a positive allosteric modulator of a GABA receptor. In aspects, the GABA receptor is GABA A. In aspects, positive allosteric modulation of a GABA receptor, such as GABA A, can exert an insecticidal effect, i.e., the plant identified and/or selected, e.g., for cultivating and/or breeding has an insecticidal TPS/terpene profile. In aspects, positive alloateric modulation of a GABA receptor, such as GABA A, can be used to manage anxiety, seizures, pain, alcohol withdrawal and the like in a subject, e.g., a human subject. Examples of terpenes that exhibit effects through positive allosteric modulation of a GABA receptor, such as GABA A, are described in Jankowska et al., Molecules, 23(34):1-20 (2018), the contents of which are expressly incorporated by reference herein. Certain examples include, but are not limited to, linalool, geraniol, α-terpineol, α/β-thujone, α-thujone, (-)-borneol and nerolidol.

### Terpene Synthase Genes Corresponding to Each of the Primer Groups

[0420] Primer Group 1 - CsTPS2SK
[0421] Primer Group 2 - CsTPS5FN
[0422] Primer Group 3 - CsTPS30PK
[0423] Primer Group 4 - CsTPS32PK
[0424] Primer Group 5 - CsTPS31 PK
[0425] Primer Group 6 - CsTPS37FN and TPS37LPA5
[0426] Primer Group 7 - CsTPS18Choc
[0427] Primer Group 8 - CsTPS5PK
[0428] Primer Group 9 - CsTPS18VF
[0429] Primer Group 10 - CsTPS19BL
[0430] Primer Group 11 - CsTPS35LS
[0431] Primer Group 12 - CsTPS6FN
[0432] Primer Group 13 - CsTPS13PK
[0433] Primer Group 14 - CsTPS38FN
[0434] Primer Group 15 - CsTPS25LS
[0435] Primer Group 16 - Guiaol Synthase QTL
[0436] Primer Group 17 - CsTPS29BC
[0437] Primer Group 18 - CsTPS1 7AK
[0438] Primer Group 19 - CsTPS33PK

### Use of Devices, Programs and Media

[0439] In certain embodiments, an outcome and/or classification obtained by the methods provided herein is provided using a suitable visual medium (e.g., a component of a machine, e.g., a printer or display). A classification and/or outcome may be provided in the form of a report. A report typically includes a display of an outcome and/or classification (e.g., a value, one or more characteristics of a sample, an assessment or probability of presence or absence of a genotype, phenotype or genetic variation; and/or an assessment or probability of a genotype, genetic variation, and/or genetic variation signature, e.g., of a TPS gene profile for a plant cultivar), sometimes includes an associated confidence parameter, and sometimes includes a measure of performance for a test used to generate the outcome and/or classification. A report sometimes includes a recommendation for a follow-up test (e.g., a test that confirms the outcome or classification).

[0440] A report can be displayed in a suitable format that facilitates determination of presence or absence of a genotype, phenotype, genetic variation or genetic variation signature. Non-limiting examples of formats suitable for use for generating a report include digital data, a graph, a 2D graph, a 3D graph, and 4D graph, a picture (e.g., a jpg, bitmap (e.g., bmp), pdf, tiff, gif, raw, png, the like or suitable format), a pictograph, a chart, a table, a bar graph, a pie graph, a diagram, a flow chart, a scatter plot, a map, a histogram, a density chart, a function graph, a circuit diagram, a block diagram, a bubble map, a constellation diagram, a contour diagram, a cartogram, spider chart, Venn diagram, nomogram, and the like, or combination of the foregoing. In embodiments, the report can be in the form of a barcode, where each line/number in the barcode represents a TPS gene or paralog thereof that is present in the plant cultivar.

[0441] A report can be generated by a computer and/or by human data entry, and can be transmitted and communicated using a suitable electronic medium (e.g., via the internet, via computer, via facsimile, from one network location to another location at the same or different physical sites), or by another method of sending or receiving data (e.g., mail service, courier service and the like). Non-limiting examples of communication media for transmitting a report include auditory file, computer readable file (e.g., pdf file), paper file, laboratory file, or any other medium described in the previous paragraph. A laboratory file may be in tangible form or electronic form (e.g., computer readable form), in certain embodiments. After a report is generated and transmitted, a report can be received by obtaining, via a suitable communication medium, a written and/or graphical representation of an outcome and/or classification, which upon review allows a qualified individual to make a determination as to one or more characteristics of a sample from a plant cultivar, such as the presence or absence of a genotype, phenotype or genetic variation in a test sample (e.g., a Cannabis plant sample).

[0442] An outcome and/or classification can be provided by and obtained from a laboratory (e.g., obtained from a laboratory file). A laboratory file can be generated by a laboratory that carries out one or more tests for determining one or more characteristics of a sample such as presence or absence of a genotype, phenotype or genetic variation for a test sample (e.g., a Cannabis plant sample). Laboratory personnel (e.g., a laboratory manager) can analyze information associated with test samples (e.g., test profiles, reference profiles, test values, reference values, level of deviation) underlying an outcome and/or classification. For calls pertaining to presence or absence of a genotype, phenotype or genetic variation that are close or questionable, laboratory personnel can re-run the same procedure using the same (e.g., aliquot of the same sample) or different test sample from a plant.

[0443] A laboratory can be in the same location or different location (e.g., in another town, city or country) as personnel assessing the presence or absence of a genotype, phenotype or genetic variation from the laboratory file. For example, a laboratory file can be generated in one location and transmitted to another location in which the information for a test sample therein is assessed by a qualified individual, and optionally, transmitted to the facility and/or grower from which the test sample was obtained. A laboratory sometimes generates and/or transmits a laboratory report containing a classification of presence or absence of a genotype, phenotype or a genetic variation for a test sample (e.g., a Cannabis plant sample).

### Machines, Software and Interfaces

[0444] Methods described herein (e.g., processing amplification results, processing high resolution melting (HRM) assay results, processing sequence read data, determining one or more characteristics of a plant cultivar based on sequence read data, associating one or more phenotypes of a plant cultivar (e.g., terpene, cannabinoid or flavonoid production profiles with one or more genotypes or genetic variants of the plant cultivar, and/or providing an outcome (e.g., indicated as desirable for breeding, or cultivating as a crop, or for therapeutic use, based on the specified selection criteria) can be computer-implemented methods, and one or more portions of a method sometimes are performed by one or more processors (e.g., microprocessors), computers, systems, apparatuses, or machines (e.g., microprocessor-controlled machine).

[0445] Computers, systems, apparatuses, machines and computer program products suitable for use often include, or are utilized in conjunction with, computer readable storage media. Non-limiting examples of computer readable storage media include memory, hard disk, CD-ROM, flash memory device and the like. Computer readable storage media generally are computer hardware, and often are non-transitory computer-readable storage media. Computer readable storage media are not computer readable transmission media, the latter of which are transmission signals per se.

[0446] Provided herein are computer readable storage media with an executable program stored thereon, where the program instructs a microprocessor to perform a method described herein. Provided also are computer readable storage media with an executable program module stored thereon, where the program module instructs a microprocessor to perform part of a method described herein. Also provided herein are systems, machines, apparatuses and computer program products that include computer readable storage media with an executable program stored thereon, where the program instructs a microprocessor to perform a method described herein. Provided also are systems, machines and apparatuses that include computer readable storage media with an executable program module stored thereon, where the program module instructs a microprocessor to perform part of a method described herein.

[0447] Also provided are computer program products. A computer program product often includes a computer usable medium that includes a computer readable program code embodied therein, the computer readable program code adapted for being executed to implement a method or part of a method described herein. Computer usable media and readable program code are not transmission media (i.e., transmission signals per se). Computer readable program code often is adapted for being executed by a processor, computer, system, apparatus, or machine.

[0448] In some embodiments, methods described herein (e.g., processing amplification results, processing high resolution melting (HRM) assay results, processing sequence read data, determining one or more characteristics of a plant cultivar based on sequence read data, associating one or more phenotypes of a plant cultivar (e.g., a Cannabis plant) with one or more genotypes or genetic variations for the plant cultivar and/or providing an outcome are performed by automated methods. In embodiments, one or more steps of a method described herein are carried out by a microprocessor and/or computer, and/or carried out in conjunction with memory. In certain embodiments, an automated method is embodied in software, modules, microprocessors, peripherals and/or a machine comprising the like, that perform methods described herein. As used herein, software refers to computer readable program instructions that, when executed by a microprocessor, perform computer operations, as described herein.

[0449] Machines, software and interfaces can be used to conduct methods described herein. Using machines, software and interfaces, a user can enter, request, query or determine options for using particular information, programs or processes (e.g., processing amplification results, processing high resolution melting (HRM) assay results, processing sequence read data, determining one or more characteristics of a plant cultivar based on sequence read data, associating one or more phenotypes of a plant cultivar with one or more genotypes or genetic variations and/or providing an outcome, which can involve implementing statistical analysis algorithms, statistical significance algorithms, statistical algorithms, iterative steps, validation algorithms, and graphical representations, for example. In embodiments, a data set can be entered by a user as input information, a user may download one or more data sets by suitable hardware media (e.g., flash drive), and/or a user can send a data set from one system to another for subsequent processing and/or providing an outcome (e.g., send sequence read data from a sequencer to a computer system for sequence read processing; send processed sequence read data to a computer system for further processing and/or yielding an outcome and/or report).

[0450] A system typically includes one or more machines. Each machine includes one or more of memory, one or more microprocessors, and instructions. Where a system includes two or more machines, some or all of the machines can be located at the same location, some or all of the machines can be located at different locations, all of the machines can be located at one location and/or all of the machines may be located at different locations. Where a system includes two or more machines, some or all of the machines can be located at the same location as a user, some or all of the machines can be located at a location different than a user, all of the machines can be located at the same location as the user, and/or all of the machine can be located at one or more locations different than the user.

[0451] A system sometimes includes a computing machine and a sequencing apparatus or machine, where the sequencing apparatus or machine is configured to receive physical nucleic acid and generate sequence reads, and the computing apparatus is configured to process the reads from the sequencing apparatus or machine. The computing machine sometimes is configured to determine an outcome from the sequence reads.

[0452] A user can, for example, place a query to software which then may acquire a data set via internet access, and in certain embodiments, a programmable microprocessor may be prompted to acquire a suitable data set based on given parameters. A programmable microprocessor also can prompt a user to select one or more data set options selected by the microprocessor based on given parameters. A programmable microprocessor can prompt a user to select one or more data set options selected by the microprocessor based on information found via the internet, other internal or external information, or the like. Options can be chosen for selecting one or more data feature selections, one or more statistical algorithms, one or more statistical analysis algorithms, one or more statistical significance algorithms, iterative steps, one or more validation algorithms, and one or more graphical representations of methods, machines, apparatuses, computer programs or a non-transitory computer-readable storage medium with an executable program stored thereon.

[0453] Systems addressed herein can include general components of computer systems, such as, for example, network servers, laptop systems, desktop systems, handheld systems, personal digital assistants, computing kiosks, and the like. A computer system can include one or more input means such as a keyboard, touch screen, mouse, voice recognition or other means to allow the user to enter data into the system. A system can further include one or more outputs, including, but not limited to, a display screen (e.g., CRT or LCD), speaker, FAX machine, printer (e.g., laser, ink jet, impact, black and white or color printer), or other output useful for providing visual, auditory and/or hardcopy output of information (e.g., outcome and/or report).

[0454] In a system, input and output components can be connected to a central processing unit which may comprise among other components, a microprocessor for executing program instructions and memory for storing program code and data. In embodiments, processes can be implemented as a single user system located in a single geographical site. In certain embodiments, processes can be implemented as a multi-user system. In the case of a multi-user implementation, multiple central processing units can be connected by means of a network. The network can be local, encompassing a single department in one portion of a building, an entire building, span multiple buildings, span a region, span an entire country or be worldwide. The network can be private, being owned and controlled by a provider, or it can be implemented as an internet-based service where the user accesses a web page to enter and retrieve information. Accordingly, in certain embodiments, a system includes one or more machines, which can be local or remote with respect to a user. More than one machine in one location or multiple locations can be accessed by a user, and data can be mapped and/or processed in series and/or in parallel. Thus, a suitable configuration and control can be utilized for mapping and/or processing data using multiple machines, such as in local network, remote network and/or “cloud” computing platforms.

[0455] A system can include a communications interface in some embodiments. A communications interface allows for transfer of software and data between a computer system and one or more external devices. Non-limiting examples of communications interfaces include a modem, a network interface (such as an Ethernet card), a communications port, a PCMCIA slot and card, and the like. Software and data transferred via a communications interface generally are in the form of signals, which can be electronic, electromagnetic, optical and/or other signals capable of being received by a communications interface. Signals often are provided to a communications interface via a channel. A channel often carries signals and can be implemented using wire or cable, fiber optics, a phone line, a cellular phone link, an RF link and/or other communications channels. Thus, in an example, a communications interface can be used to receive signal information that can be detected by a signal detection module.

[0456] Data can be input by a suitable device and/or method, including, but not limited to, manual input devices or direct data entry devices (DDEs). Non-limiting examples of manual devices include keyboards, concept keyboards, touch sensitive screens, light pens, mouse, tracker balls, joysticks, graphic tablets, scanners, digital cameras, video digitizers and voice recognition devices. Non-limiting examples of DDEs include bar code readers, magnetic strip codes, smart cards, magnetic ink character recognition, optical character recognition, optical mark recognition, and turnaround documents.

[0457] A system can include software useful for performing a process or part of a process described herein, and software can include one or more modules for performing such processes (e.g., sequencing module, logic processing module, data display organization module). The term “software” refers to computer readable program instructions that, when executed by a computer, perform computer operations. Instructions executable by the one or more microprocessors sometimes are provided as executable code, that when executed, can cause one or more microprocessors to implement a method described herein. A module described herein can exist as software, and instructions (e.g., processes, routines, subroutines) embodied in the software can be implemented or performed by a microprocessor. For example, a module (e.g., a software module) can be a part of a program that performs a particular process or task. The term “module” refers to a self-contained functional unit that can be used in a larger machine or software system. A module can include a set of instructions for carrying out a function of the module. A module can transform data and/or information. Data and/or information can be in a suitable form. For example, data and/or information can be digital or analogue. In certain embodiments, data and/or information sometimes can be packets, bytes, characters, or bits. In embodiments, data and/or information can be any gathered, assembled or usable data or information. Non-limiting examples of data and/or information include a suitable media, pictures, video, sound (e.g. frequencies, audible or non-audible), numbers, constants, a value, objects, time, functions, instructions, maps, references, sequences, reads, mapped reads, levels, ranges, thresholds, signals, displays, representations, or transformations thereof. A module can accept or receive data and/or information, transform the data and/or information into a second form, and provide or transfer the second form to a machine, peripheral, component or another module. A microprocessor can, in certain embodiments, carry out the instructions in a module. In embodiments, one or more microprocessors are required to carry out instructions in a module or group of modules. A module can provide data and/or information to another module, machine or source and can receive data and/or information from another module, machine or source.

[0458] A computer program product sometimes is embodied on a tangible computer-readable medium, and sometimes is tangibly embodied on a non-transitory computer-readable medium. A module sometimes is stored on a computer readable medium (e.g., disk, drive) or in memory (e.g., random access memory). A module and microprocessor capable of implementing instructions from a module can be located in a machine or in a different machine. A module and/or microprocessor capable of implementing an instruction for a module can be located in the same location as a user (e.g., local network) or in a different location from a user (e.g., remote network, cloud system). In embodiments in which a method is carried out in conjunction with two or more modules, the modules can be located in the same machine, one or more modules can be located in different machine in the same physical location, and one or more modules can be located in different machines in different physical locations.

[0459] A machine, in some embodiments, includes at least one microprocessor for carrying out the instructions in a module. In some embodiments, a machine includes a microprocessor (e.g., one or more microprocessors) which microprocessor can perform and/or implement one or more instructions (e.g., processes, routines and/or subroutines) from a module. In some embodiments, a machine includes multiple microprocessors, such as microprocessors coordinated and working in parallel. In some embodiments, a machine operates with one or more external microprocessors (e.g., an internal or external network, server, storage device and/or storage network (e.g., a cloud)). In embodiments, a machine includes a module one or more modules. A machine that includes a module often is capable of receiving and transferring one or more of data and/or information to and from other modules.

[0460] In certain embodiments, a machine includes peripherals and/or components. In certain embodiments, a machine can include one or more peripherals or components that can transfer data and/or information to and from other modules, peripherals and/or components. In certain embodiments, a machine interacts with a peripheral and/or component that provides data and/or information. In certain embodiments, peripherals and components assist a machine in carrying out a function or interact directly with a module. Non-limiting examples of peripherals and/or components include a suitable computer peripheral, I/O or storage method or device including but not limited to scanners, printers, displays (e.g., monitors, LED, LCT or CRTs), cameras, microphones, pads (e.g., ipads, tablets), touch screens, smart phones, mobile phones, USB I/O devices, USB mass storage devices, keyboards, a computer mouse, digital pens, modems, hard drives, jump drives, flash drives, a microprocessor, a server, CDs, DVDs, graphic cards, specialized I/O devices (e.g., sequencers, photo cells, photo multiplier tubes, optical readers, sensors, etc.), one or more flow cells, fluid handling components, network interface controllers, ROM, RAM, wireless transfer methods and devices (Bluetooth, WiFi, and the like), the world wide web (www), the internet, a computer and/or another module.

[0461] Software often is provided on a program product containing program instructions recorded on a computer readable medium, including, but not limited to, magnetic media including floppy disks, hard disks, and magnetic tape; and optical media including CD-ROM discs, DVD discs, magnetooptical discs, flash memory devices (e.g., flash drives), RAM, floppy discs, the like, and other such media on which the program instructions can be recorded. In online implementation, a server and web site maintained by an organization can be configured to provide software downloads to remote users, or remote users can access a remote system maintained by an organization to remotely access software. Software can obtain or receive input information. Software can include a module that specifically obtains or receives data and may include a module that specifically processes the data (e.g., a processing module that processes received data). The terms “obtaining” and “receiving” input information refers to receiving data by computer communication means from a local, or remote site, human data entry, or any other method of receiving data. The input information may be generated in the same location at which it is received, or it may be generated in a different location and transmitted to the receiving location. In embodiments, input information is modified before it is processed (e.g., placed into a format amenable to processing, e.g., tabulated).

[0462] Software can include one or more algorithms in certain embodiments. An algorithm can be used for processing data and/or providing an outcome or report according to a finite sequence of instructions. An algorithm often is a list of defined instructions for completing a task. Starting from an initial state, the instructions can describe a computation that proceeds through a defined series of successive states, eventually terminating in a final ending state. The transition from one state to the next is not necessarily deterministic (e.g., some algorithms incorporate randomness). By way of example, and without limitation, an algorithm can be a search algorithm, sorting algorithm, merge algorithm, numerical algorithm, graph algorithm, string algorithm, modeling algorithm, computational genometric algorithm, combinatorial algorithm, machine learning algorithm, cryptography algorithm, data compression algorithm, parsing algorithm and the like. An algorithm can include one algorithm or two or more algorithms working in combination. An algorithm can be of any suitable complexity class and/or parameterized complexity. An algorithm can be used for calculation and/or data processing, and in some embodiments, can be used in a deterministic or probabilistic/predictive approach. An algorithm can be implemented in a computing environment by use of a suitable programming language, non-limiting examples of which are C, C++, Java, Perl, Python, Fortran, and the like. In embodiments, an algorithm can be configured or modified to include margin of errors, statistical analysis, statistical significance, and/or comparison to other information or data sets (e.g., applicable when using a neural net or clustering algorithm).

[0463] In certain embodiments, several algorithms can be implemented for use in software. These algorithms can be trained with raw data in some embodiments. For each new raw data sample, the trained algorithms can produce a representative processed data set or outcome. A processed data set sometimes is of reduced complexity compared to the parent data set that was processed. Based on a processed set, the performance of a trained algorithm can be assessed based on sensitivity and specificity, in some embodiments. An algorithm with the highest sensitivity and/or specificity can be identified and utilized, in certain embodiments.

[0464] In certain embodiments, simulated (or simulation) data can aid data processing, for example, by training an algorithm or testing an algorithm. In embodiments, simulated data includes hypothetical various samplings of different groupings of sequence reads, genotypes, phenotypes, genetic variations, and/or genetic variation signatures. Simulated data can be based on what might be expected from a real population or may be skewed to test an algorithm and/or to assign a correct classification. Simulated data also is referred to herein as “virtual” data. Simulations can be performed by a computer program in certain embodiments. One possible step in using a simulated data set is to evaluate the confidence of identified results, e.g., how well a random sampling matches or best represents the original data. One approach is to calculate a probability value (p-value), which estimates the probability of a random sample having better score than the selected samples. In embodiments, an empirical model may be assessed, in which it is assumed that at least one sample matches a reference sample (with or without resolved variations). In certain embodiments, another distribution, such as a Poisson distribution for example, can be used to define the probability distribution.

[0465] A system can include one or more microprocessors in certain embodiments. A microprocessor can be connected to a communication bus. A computer system can include a main memory, often random access memory (RAM), and can also include a secondary memory. Memory in some embodiments includes a non-transitory computer-readable storage medium. Secondary memory can include, for example, a hard disk drive and/or a removable storage drive, representing a floppy disk drive, a magnetic tape drive, an optical disk drive, memory card and the like. A removable storage drive often reads from and/or writes to a removable storage unit. Non-limiting examples of removable storage units include a floppy disk, magnetic tape, optical disk, and the like, which can be read by and written to by, for example, a removable storage drive. A removable storage unit can include a computer-usable storage medium having stored therein computer software and/or data.

[0466] A microprocessor can implement software in a system. In some embodiments, a microprocessor can be programmed to automatically perform a task described herein that a user could perform. Accordingly, a microprocessor, or algorithm conducted by such a microprocessor, can require little to no supervision or input from a user (e.g., software may be programmed to implement a function automatically). In some embodiments, the complexity of a process is so large that a single person or group of persons could not perform the process in a timeframe short enough for determining one or more characteristics of a sample.

[0467] In certain embodiments, secondary memory can include other similar means for allowing computer programs or other instructions to be loaded into a computer system. For example, a system can include a removable storage unit and an interface device. Non-limiting examples of such systems include a program cartridge and cartridge interface (such as that found in video game devices), a removable memory chip (such as an EPROM, or PROM) and associated socket, and other removable storage units and interfaces that allow software and data to be transferred from the removable storage unit to a computer system.

### Compositions and Kits

[0468] Provided in certain embodiments are compositions. Compositions useful for carrying out any of the methods described herein are provided. For example, compositions that include any of the primers, primer pairs and sets of more than one primer pair described herein are provided. In certain embodiments, the compositions include one or more of primers or primer pairs for identifying monoterpene synthases, primers or primer pairs for identifying diterpene synthases and primers or primer pairs for identifying sesquiterpene synthases. In embodiments, the compositions include one or more of primers or primer pairs for identifying monoterpene synthases. In embodiments the compositions include one or more of primers or primer pairs for identifying diterpene synthases. In embodiments, the compositions include one or more of primers or primer pairs for identifying sesquiterpene synthases. In any of the compositions provided herein, in certain embodiments, the primers are selected from among those of SEQ ID NOS:1-1284, 1398 and 1399; from among the LAMP primers of SEQ ID NOS:1285-1327 or the LAMP primer sets of SEQ ID NOS:1285-1293; 1294-1302; 1303-1311; 1312-1319 and 1320-1327; or from among the full-length amplifying primers of SEQ ID NOS:1328-1338; in Primer Groups 1-19 as set forth in Tables 1-16 and in B3/F3 polynucleotide primer pairs set forth in Tables 17-35. In embodiments, the primers are selected from among those set forth in SEQ ID NOS: 1-1284, 1398 and 1399; from among the LAMP primers of SEQ ID NOS:1285-1327 or the LAMP primer sets of SEQ ID NOS:1285-1293; 1294-1302; 1303-1311; 1312-1319 and 1320-1327, or from among the full-length amplifying primers of SEQ ID NOS:1328-1338; in Primer Groups 1-19 as set forth in Tables 1-16 and in B3/F3 polynucleotide primer pairs set forth in Tables 17-35 and/or from among sequences that share 90%, 91%, 92%, 93%, 94%, 95%, 96%, 97%, 98%, 99% or more identity with any of the sequences set forth in SEQ ID NOS: 1-1284, 1398 and 1399; the LAMP primers of SEQ ID NOS:1-1327 or the LAMP primer sets of SEQ ID NOS:1285-1293; 1294-1302; 1303-1311; 1312-1319 and 1320-1327, or from among the full-length amplifying primers of SEQ ID NOS:1328-1338; in Primer Groups 1-19 as set forth in Tables 1-16 and in B3/F3 polynucleotide primer pairs set forth in Tables 17-35. In embodiments, any of the forward primers in the primer pairs provided in SEQ ID NOS: 1-1284, or in sequences that share 90%, 91%, 92%, 93%, 94%, 95%, 96%, 97%, 98%, 99% or more identity with any of the sequences set forth in SEQ ID NOS: 1-1284, 1398 and 1399; in Primer Groups 1-19 as set forth in Tables 1-16 and in B3/F3 polynucleotide primer pairs set forth in Tables 17-35 can be paired with any of the reverse primers of the primer pairs having the sequences set forth in SEQ ID NOS: 1-1284, 1398 and 1399; in Primer Groups 1-19 as set forth in Tables 1-16 and in B3/F3 polynucleotide primer pairs set forth in Tables 17-35 or with sequences that share 90%, 91%, 92%, 93%, 94%, 95%, 96%, 97%, 98%, 99% or more identity with any of the sequences set forth in SEQ ID NOS: 1-1284, 1398 and 1399, in Primer Groups 1-19 as set forth in Tables 1-16 and in B3/F3 polynucleotide primer pairs set forth in Tables 17-35.

[0469] In embodiments, the primer pairs of the compositions provided herein are complementary to a unique subsequence of a TPS gene or a paralog thereof, wherein the unique subsequence of the TPS gene or paralog thereof is different than the other subsequences of the TPS gene or paralog thereof and is different than the subsequences of other TPS genes or paralogs thereof. In certain embodiments, the TPS gene or a paralog thereof is of a Cannabis cultivar. In embodiments, the compositions provided herein include at least one primer or primer pair that is complementary to a genetically modified TPS gene or paralog thereof.

[0470] Also provided herein are compositions that include at least one amplicon generated by any of the polynucleotide primer pairs provided herein.

[0471] In aspects, one or more of the primers or primer pairs in the compositions provided herein can be synthesized using standard methods and equipment, such as the ABl®3900 High Throughput DNA Synthesizer and EXPEDITE®8909 Nucleic Acid Synthesizer, both of which are available from Applied Biosystems (Foster City, CA). Analogs and derivatives are described in U.S. Pat. Nos. 4,469,863; 5,536,821; 5,541,306; 5,637,683; 5,637,684; 5,700,922; 5,717,083; 5,719,262; 5,739,308; 5,773,601; 5,886,165; 5,929,226; 5,977,296; 6,140,482; WO 00/56746; WO 01/14398, and related publications. Methods for synthesizing nucleic acids containing such analogs or derivatives are disclosed, for example, in the patent publications cited above and in U.S. Pat. Nos. 5,614,622; 5,739,314; 5,955,599; 5,962,674; 6,117,992; in WO 00/75372 and in related publications. In certain embodiments, analog nucleic acids include inosines, abasic sites, locked nucleic acids, minor groove binders, duplex stabilizers (e.g., acridine, spermidine) and/or other melting temperature modifiers, containing base analogs, sugar analogs and/or a non-native backbone and the like, RNA/DNA hybrids and polyamide nucleic acids (PNAs). A primer or primer pair can, in certain aspects, contain a modification such as one or more nonstandard nucleotides, non-natural nucleotides, universal bases, degenerate nucleotides, inosines, abasic sites, locked nucleic acids, minor groove binders, duplex stabilizers (e.g., acridine, spermidine), Tm modifiers or any modifier that changes the binding properties of the primers. A primer or primer pair, in certain aspects, can contain a detectable molecule or entity (e.g., a fluorophore, radioisotope, colorimetric agent, particle, enzyme, and the like). A primer also can refer to a polynucleotide sequence that, when hybridized to a subsequence of a target nucleic acid or another primer, facilitates the detection of a primer, a target nucleic acid or both, as with molecular beacons, for example. The term “molecular beacon,” as used herein, refers to detectable molecule, where the detectable property of the molecule is detectable only under certain specific conditions, thereby enabling it to function as a specific and informative signal. Non-limiting examples of detectable properties are, optical properties, electrical properties, magnetic properties, chemical properties and time or speed through an opening of known size.

[0472] In the compositions provided herein, any of the modified primer or primer pairs provided herein can be used to generate amplicons containing the modifications. In aspects, the amplicons can directly be modified, e.g., under amplification conditions that include non-natural nucleotide analogs or by complexing/labeling the amplicon using a detectable label.

[0473] Modified nucleotides and nucleotide analogs in some aspects of the primer, primer pairs and/or amplicons of the compositions provided herein can include, in certain aspects and without limitation, dideoxynucleotides, acyclic nucleotide analogs, deazapurine nucleotides, e.g., 7-deaza-deoxyguanosine (7-deaza-dG) and 7-deaza-deoxyadenosine (7-deaza-dA) mono-, di- and triphosphates, deutero-deoxythymidine (deutero-dT) mon-, di- and triphosphates, methylated nucleotides e.g., 5-methyldeoxycytidine triphosphate, ¹³C/¹⁵N labeled nucleotides and deoxyinosine mono-, di- and triphosphate.

### Detectable Labels

[0474] Examples of detectable labels include, but are not limited to, radiolabels, chromophores, chemiluminescent moieties, bioluminescent moieties, fluorescent moieties and metals.

[0475] Examples of chemiluminescent materials include, but are not limited to, any selected from among oxalyl chloride, Rodamin 6G, Ru(bipy)32+, TMAE (tetrakis(dimethylamino)ethylene), Pyrogallol (1,2,3-trihydroxibenzene), Lucigenin, peroxyoxalates, Aryl oxalates, Acridinium esters, dioxetanes, and others. Examples of chromophores include, but are not limited to, 3,3′-diaminobenzidine (DAB); 3-amino-9-ethyl carbazole (AEC); Fast Red; FD&C Yellow 5 (Tartrazine); Malachite Green Carbinol hydrochloride; Crocein Scarlet 7B (Dark Red); Erloglaucine (Dark Blue); Crystal Violet (Dark Purple); Bromophenol Blue; Cobalt(II) Chloride Hexahydrate (Red); Basic Violet 3; Acid Blue 9; Acid Red 71; FD&C Blue 1 (Brilliant Blue FCF); FD&C Red 3 (Erythrozine); and FD&C Red 40 (Allura Red AC).

[0476] Examples of fluorophores (fluorescent labels) include, but are not limited to, di-8-ANEPPS, di-4-ANEPPS, a carbocyanine dye (e.g., DiO, DiL), a PKH dye (exemplary of which are PKH-26 and PKH-67), Dylight488, Brilliant Violet, Pacific Blue, Chrome Orange, Brilliant Blue 515, phycoerythrin (PE), rhodamine, fluorescein, FITC, PE-Cy5.5, PE-Cy7, APC, Alexa647, APC-Alexa700 and APC-Alexa750, Oregon Green®, derivatives of rhodamine (e.g., Texas Red and tetrarhodimine isothiocynate (TRITC)), AMCA, Alexa Fluor®, Li-COR®, CyDyes® or DyLight® Fluors); tdTomato, mCherry, mPlum, Neptune, TagRFP, mKate2, TurboRFP and TurboFP635 (Katushka). Fluorescent “reporter” labels for labelling primers or amplicons also are known to those of skill in the art and can include, for example, 5-TAMRA (5-carboxytetramethylrhodamine), 6-TAMRA (6-carboxytetramethylrhodamine), a mixture of 5-TAMRA and 6-TAMRA, 5-TAMRA NHS (N-hydroxysuccinimide) ester, 6-TAMRA NHS ester, a mixture of 5-TAMRA NHS ester and 6-TAMRA NHS ester, Cy5 (cyanine 5), Cy3 (cyanine 3), FAM (6-carboxyfluorescein), TET (tetrachloro-6-carboxy-fluorescein), TEX (sulforhodamine 101), ROX (carboxy-X-rhodamine), JOE (4,5-dichlorocarboxyfluorescein), 6-JOE (6-carboxy-4′5′-dichloro-2′,7′-dimethoxy fluorescein), 6-JOE SE (6-carboxy-4′5′-dichloro-2′,7′-dimethoxy fluorescein, succinimidyl ester), 6-JOE NHS (6-carboxy-4′5′-dichloro-2′,7′-dimethoxy fluorescein, N-hydroxysuccinimide ester), HEX (hexacholoro-6-carboxy-fluorescein), FITC (fluorescein isothiocyanate), rhodamines, tetramethylrhodamine, TRITC (tetrarhodimine isothiocynate), BODIPY (N-[6-(2,2-difluoro-10,12-dimethyl-1-aza-3-azonia-2-boranuidatricyclo[7.3.0.0^{3,7}]dodeca-3,5,7,9,11-pentaen-4-yl)-1-(3-hydroxy-2,5-dioxopyrrolidin-1-yl)-1-oxohexan-2-yl]propenamide), xanthenes, fluoresceins, cyanines, carbocyanines, coumarins and derivatives thereof. Many equivalent detection labels, both proprietary and non-proprietary, are readily available and known to those of skill in the art.

[0477] Examples of non-specific dyes that emit a fluorescent signal when bound to double-stranded DNA (e.g., by intercalation) include, but are not limited to, ethidium bromide, thiazole orange, oxazole yellow, BOXTO (4-[6-(benzoxazole-2-yl-(3-methyl-)-2,3-dihydro-(benzo-1,3-thiazole)-2-methylidene)]-1-methyl-quinolinium chloride) and its positive divalent derivative BOXTO-PRO (4-[(3-methyl-6- (benzoxazole-2-yl)-2,3-dihydro-(benzo-1,3-thiazole)-2-methylidene)]-1-(3-trimethylammonium-propyl)-quinolinium dibromide), SYBR GREEN I (N′,N′-dimethyl-N-[4-[(E)-(3-methyl-1,3-benzothiazol-2-ylidene)methyl]-1-phenylquinolin-1-ium-2-yl]-N-propylpropane-1,3-diamine), SYBR GOLD [2-[N-(3-dimethylaminopropyl)-N-propylamino]-4-[2,3-dihydro-3-methyl-(benzo-1,3-thiazol-2-yl)-methylidene]-1-phenyl-quinolinium], YoYo-1 [1²(2)Z,16(17²)Z]-1³,7,7,11,11,17³-Hexamethyl-13H,173H-7,11-diaza-3¹λ⁵,15¹λ⁵-3(4,1),15(1,4)-diquinolina-1,17(2)-bis([1,3]benzoxazola)heptadecaphane-1²(2),16(17²)-diene-7,11-diium-3′,15′-bis(ylium) tetraiodide), Yo-Pro-1 (trimethyl-[3-[4-[(2)-(3-methyl-1,3-benzoxazol-2-ylidene)methyl]quinolin-1-ium-1-yl]propyl]azanium;diiodide), BEBO (4-[(3-methyl-6-(benzothiazol-2-yl)-2,3-dihydro- (benzo-1,3-thiazole)-2-methylidene)]-1-methyl-pyridinium iodide) and others such as those described, for example, in PCT Publication No. WO 2002/090443 A1 and in U.S. Pat. No. 7,378,240 B2. Many equivalent non-specific detection labels, both proprietary and non-proprietary, are readily available and known to those of skill in the art.

[0478] Fluorescence quencher labels also can be used to modify the primers, primer pairs and/or amplicons in the compositions provided herein; examples of these include, but are not limited to, 5-TAMRA (5-carboxytetramethylrhodamine), 6-TAMRA (6-carboxytetramethylrhodamine), a mixture of 5-TAMRA and 6-TAMRA, 5-TAMRA NHS (N-hydroxysuccinimide) ester, 6-TAMRA NHS ester, a mixture of 5-TAMRA NHS ester and 6-TAMRA NHS ester, DABSYL

[0479] (dimethylaminoazobenzenesulfonic acid), Black Hole Quencher molecules (BHQ), Iowa Black FQ / Iowa Black RQ and related fluorescence quenchers such as those described in U.S. Pat. Nos. 7,439,341, 7,803,536, 7,476,735, 7,605,243, 7,645,872, 8,030,460, 8,084,588, 8,114,979, 8,258,276 and 8,916,345, the contents of which are incorporated expressly by reference herein. Many equivalent fluorescence quencher labels, both proprietary and non-proprietary, are readily available and known to those of skill in the art.

### Kits

[0480] Provided in certain embodiments are kits. The kits can include any components and compositions described herein, e.g., primers, primer pairs, primer sets, including LAMP primer sets, reagents for hybridization or amplification of at least one TPS gene or paralog thereof, solid supports, collections of solid supports, one or more detection labels for detecting amplicons and instructions for use to, e.g., analyze the TPS gene profile of a plant cultivar of interest, or to identify a genetically modified plant cultivar of interest. A kit for amplifying nucleic acid from an RNA template can further include reagents for reverse transcription (e.g., for generating cDNA).

[0481] Components of a kit can be present in separate containers, or multiple components can be present in a single container. In embodiments, primers are provided such that each container contains a single primer pair (e.g., for individual amplification reactions). In certain embodiments, primers are provided such that one container contains a plurality of primer pairs (e.g., for multiplexed amplification reactions). Suitable containers include a single tube (e.g., vial), one or more wells of a plate (e.g., a 96-well plate, a 384-well plate, and the like), chips and the like.

[0482] Kits also can include instructions for performing one or more methods described herein and/or a description of one or more components described herein. For example, a kit can include instructions for using the amplification primers provided herein, to amplify nucleic acid (e.g., to amplify unique subsequences of a TPS gene or paralog thereof in a plant cultivar). In certain embodiments, a kit can include instructions or a guide for interpreting the results of an amplification reaction. Instructions and/or descriptions can be in printed form and can be included in a kit insert. In embodiments, instructions and/or descriptions are provided as an electronic storage data file present on a suitable computer readable storage medium, e.g., portable flash drive, DVD, CD-ROM, diskette, and the like. A kit also can include a written description of an internet location that provides such instructions or descriptions.

### EXAMPLES

[0483] The examples set forth below illustrate certain embodiments and do not limit the technology.

### Example 1: Representative PCR Protocol Using Polynucleotide Primer Pairs / Sets of Primer Pairs Provided Herein to Identify and/or Select Plant Cultivars With Desired Terpene Profiles

[0484] The primer sequences that were designed, and their corresponding target terpene synthase genes, are set forth in Table B, in Primer Groups 1-19 as set forth in Tables 1-16 and in B3/F3 polynucleotide primer pairs set forth in Tables 17-35. These primers specifically targeted the identified coding regions (exons) of the terpene synthase genes but could also be used to examine informative introns through using other combinations of the primers described herein.

[0485] These primers can be used to amplify their target sequences in traditional PCR on total DNA or purified genomic DNA, as well as in reverse-transcriptase PCR to identify variants and presence/absence variation of expressed DNA.

[0486] Table 36 depicts an example of parameters of a traditional PCR protocol in which the primers provided herein (e.g., as described in Table B, in Primer Groups 1-19 as set forth in Tables 1-16 and in B3/F3 polynucleotide primer pairs set forth in Tables 17-35) can be used:

TABLE 36

| | | | |
|---|---|---|---|
| Traditional Program: 30 cycles | | Temperature | Time |
| Initiation/Polymerase Activation: | | 95-97° C. | 2 mins |
| | Start of Cycling: | | |
| Denaturation: | | 95° C. | 10 secs |
| Step Down Annealing: | | 52-58° C. ** | 10 secs |
| Elongation: | | 72° C. | 30 secs |
| | Final Elongation Step: | 72° C. | 5-15 mins |

** Annealing temperature is specific for each primer set. For determining optimal T _{annealing}, the highest Tₘ of the two primers in a given set minus 5° C. results in the optimal annealing temperature.

[0487] Table 37 depicts an example of parameters of a step-down PCR protocol, using standard PCR reagents, in which the primers provided herein (e.g., as described in Table B) can be used:

TABLE 37

| | | | |
|---|---|---|---|
| Step-Down Program: 30 cycles | | Temperature | Time |
| Initiation/Polymerase Activation: | | 95-97° C. | 2 mins |
| | Start of Cycling: | | |
| Denaturation: | | 95° C. | 10 secs |
| Step Down Annealing: | | 60° C. (sec. target 50° C.) | 10 secs |
| Elongation: | | 72° C. | 30 secs |
| | Final Elongation Step: | 72° C. | 5-15 mins |

[0488] It is understood by those of skill in the art that modifications to these protocols can be made to achieve the same or similar results. For example, the temperatures for the various steps in the can be modified by between about 1-5° C., or touchdown PCR can be performed, i.e., the annealing temperature is adjusted based on the cycle number.

### Example 2: Use of Exon-Specific Primers to Obtain Terpene Synthase Fingerprints of a Plant Cultivar

### DNA Isolation

[0489] Genomic DNA is isolated from Cannabis samples using the Qiagen DNA Easy Plant genomic DNA isolation kits (Qiagen) or the Promega Wizard genomic DNA kit (Promega) using manufacturer’s instructions, FTA plant saver cards (Whatman’s Flinders Technology Associates, a technology developed by GE Healthcare for lysing cells and storing DNA on a piece of Whatman filter paper), or an in-house crude preparation of genomic DNA extracts. A crude DNA extract is prepared by Tris/Triton-X pre-treatment of 1 mm raw leaf or leaf imprinted FTA card sections, as modified from Klimyuk et al. (Plant J., 3(3):493-494 (1993)) in a modified 96 well format for high throughput processing. Leaf or FTA selections were placed aseptically in a 96 well microtiter plate, 100 uL 0.25 M Tris-HCI with 0.25% Triton-X-100 was added to each well, and the plates were incubated at 100° C. for 5 minutes on a Veriti thermocycler (ABI). 3 uL of crude genomic DNA extract was used as input for the pre-amplification PCR reaction.

### RNA Isolation

[0490] Plant material/tissue from Cannabis is flash frozen in liquid nitrogen or placed in a RNase inhibitory solution, such as RNALater, for in-grow collection of tissue for cDNA analysis. Total RNA is then isolated from Cannabis tissues using any plant RNA extraction kit or method available and/or known to those of skill in the art. Examples of such kits include: the Qiagen RNAeasy plant extraction kit, which can be used following manufacturer’s instructions or modifying the instructions by using RLC buffer to provide a higher quality extraction that yields greater concentrations of RNA, the Direct-zol RNA isolation kit and the Zymogen Quick-RNA Plant mini prep kit. An example of an RNA isolation protocol is as follows:

[0491] Total RNA is isolated from fresh Cannabis leaf tissue samples using the Direct-zol RNA isolation kit and Zymogen Quick-RNA Plant mini prep kit with DNAase digestion, using manufacturer’s instructions (Zymogen). Purified RNA is prepared for quantification using the QuantiFluor HS-ssRNA System (Promega) and quantified using a Quantus Fluorometer (Promega), as per the manufacturer’s instructions.

[0492] The quantified RNA is diluted to a final working concentration of 5 ng/uL and used as normalized input into either a First strand cDNA synthesis reaction or a one-step reverse transcriptase real-time qPCR reaction.

### cDNA Synthesis

[0493] The single-stranded RNA is then converted to double-stranded cDNA using any available cDNA-synthesis reverse transcriptase (RT-PCR) kit or method available and/or known to those of skill in the art. Example of kits that can be used are the High Capacity RNA-to-cDNA Kit or The SuperScript IV First-Strand Synthesis System (both from Thermofisher Scientific), or Qiagen’s FastLane Cell cDNA Kit. These provide double-stranded DNA that can be subjected to High Resolution Melt (HRM) analysis with or without a pre-amplification step, depending on the RNA extraction quality. Additionally, after the RNA extraction and before the cDNA synthesis, the sample can be subjected to ribo-depletion or mRNA amplification, to remove rRNA and obtain greater sensitivity for the detection of terpene synthase genes that are expressed at a low level. An example of a cDNA synthesis protocol is as follows:

[0494] Quantified RNA is used as input for cDNA synthesis using the SuperScript™ IV First-Strand Synthesis System (ThermoFisher). cDNA synthesis reactions are prepared as follows: 1 µL 50 µM Oligo d(T) 20 primer (SEQ ID NO:1400), 1 µL of 10 mM dNTP mix (10 mM each dNTP), 8 µLTemplate RNA (10 pg-5 µg total RNA or 10 pg-500 ng mRNA), up to 3 µL DEPC-treated water are mixed together for a 13 µL final volume. After mixing and briefly centrifuging, the RNA-primer mix reactionsawere heated at 65° C. for 5 minutes, and then incubated at 0° C. for 2 minutes on a Veriti thermocycler (ABI).

[0495] Following annealing, the plate is pierced using a plate piercer and 7 uL Reverse transcriptase (RT) reaction mix is added to each reaction for a final volume of 20 uL final volume for cDNA synthesis. The RT reaction mix is prepared by mixing together the following: 4 µL of 5× SSIV Buffer, 1 µL of 100 mM DTT, 1 µL of Ribonuclease Inhibitor, and 1 µL of SuperScript™ IV Reverse Transcriptase (200 U/µL). The plate is sealed and briefly centrifuged, then loaded onto a Veriti thermocycler for cDNA synthesis using the following protocol:
[0496] Incubate the combined reaction mixture at 50-55° C. for 10 minutes;
[0497] Inactivate the reaction mixture by incubation at 80° C. for 10 minutes, then store at 4° C.

[0498] The resulting products of cDNA synthesis are prepared for quantification using the QuantiFluor HS-dsDNA System (Promega) and quantified using a Quantus Fluorometer (Promega), as per the manufacturer’s instructions. The quantitated cDNA is diluted to a 2 ng/uL final working concentration and used as normalized input into either an end-point PCR reaction or a Taqman real-time qPCR reaction.

### Endpoint PCR With Gel Analysis

[0499] 2.5 uL of normalized cDNA is used as input for a PCR Master Mix (total volume: 22.5 uL), as follows: 12.5 uL 2X Promega Colorless GoTaq (Promega), 0.1 uL of 100 uM Primer Mix (see Table B, in Primer Groups 1-19 as set forth in Tables 1-16 and in B3/F3 polynucleotide primer pairs set forth in Tables 17-35 for primer sequences); 100 uM of a single primer pair to detect one exon, or multiple primer pairs that each detects an exon of unique size in the set of TPS genes of the plant cultivar of interest), and 9.5 uL Nuclease free Water (Ambion).

[0500] The reactions are subjected to the following thermocycler protocol: 1 cycle of 95° C. for 10 mins; 35 cycles of 95° C. for 40 seconds, 60° C. for 2 mins, 72° C. for 2 mins; 1 cycle of 72° C. for 5 mins; 4° C. hold. The End point PCR reactions are analyzed by diluting 1:2 in nuclease free water and 20 ul is loaded into each well of one or more E-Gel™ EX Agarose Gels, 2%, depending on the number of samples, and run for 10 minutes on 1-2% gel settings for the E-gel system. The bands are analyzed for the presence of exons, based on the expected sizes of the amplicons. In addition, if the DNA is normalized, the intensities (e.g., fluorescence intensity) of the bands can provide information regarding the numbers of copies of the TPS genes and/or the ploidy (e.g., diploid, triploid, tetraploid, etc.).

### Pro-Amplification PCR

[0501] To reduce the effect of plant materials in subsequent reactions and analyses, for example when crude DNA or RNA extracts are used, plant pigments and potentially real time qPCR-inhibiting compounds often found in such extracts can optionally be removed by performing a pre-amplification PCR for 10 cycles. 2.5 uL of crude genomic DNA extract is transferred to a second PCR plate, with each well pre-loaded with 22.5 uL of Pre-amplification PCR master mix prepared per reaction as follows: 12.5 uL 2X Promega Colorless GoTaq (Promega), 3 uL of 4 uM of the desired primers to be analyzed (see Table B, in Primer Groups 1-19 as set forth in Tables 1-16 and in B3/F3 polynucleotide primer pairs set forth in Tables 17-35 for primer sequences), and 7 uL Nuclease free Water (Ambion). The reactions are subjected to the following thermocycler protocol: 1 cycle of 95° C. for 10 mins; 10 cycles of 95° C. for 40 sec, 60° C. for 2 mins, 72° C. for 2 mins; 1 cycle of 72° C. for 5 mins; 4° C. hold.

[0502] Pre-amplification reactions are diluted 1:5 with 100 uL Nuclease free water (Ambion). The diluted pre-amplification reactions are prepared for quantification using the QuantiFluor dsDNA System (Promega) and quantified using a Quantus Fluorometer (Promega), as per manufacturer’s instructions. Quantitated diluted pre-amplification reactions reveal a final working concentration of ~1 ng/uL, which is used as unnormalized input into the real time qPCR reactions.

### High Resolution Melt (HRM) Analysis

[0503] HRM analysis was performed in 10 uL reactions on a LightCycler 480 qPCR (Roche Applied Systems) using the following protocol: 1 pre-incubation cycle (95° C. for 10 mins), 45 amplification cycles (95° C. for 10 secs, 60° C. for 15 secs, 72C for 10 secs), 1 cycle of HRM (95° C. for 1 min, 40° C. for 1 min, 65° C. for 1 sec and heat to 95° C. with 25 continuous acquisitions per degree Celsius followed by a final cooling cycle (40° C. for 10 secs) (Vossen et al., Biochemica 4:10-11 (2007)). Each reaction contains: 5 uL of ~1 ng/uL of the diluted pre-amplified template that is the product of pre-amplification PCR. cDNA also can be amplified in an exon-specific manner to get a fingerprint of the terpene synthase expressosome, i.e., to see which of the TPS genes are expressed (using a single pair of primers or multiple pairs of primers that each amplify an exon of a unique size), or gDNA can be amplified (with or without pre-amplification) to get a fingerprint of the entire genome. 5 uL of HRM Master Mix (prepared per reaction as follows: 3.5 uL 2X High Resolution Melting Master Mix containing HRM dye (Roche Applied Systems), 0.6 uL of 4 uM Primer Mix (see Table B, in Primer Groups 1-19 as set forth in Tables 1-16 and in B3/F3 polynucleotide primer pairs set forth in Tables 17-35 for primer sequences; 4 uM of a single primer pair to detect one exon, or multiple primer pairs that each detects an exon of unique size in the set of TPS genes of the plant cultivar of interest), 0.8 uL of 25 mM MgCl₂, 1.125 uL of Nuclease free water). High Resolution Melting data was analyzed using the LightCycler 480 Melt Genotyping software. Fluorescence intensity as a function of temperature for each sample also was analyzed using R software and Matlab custom scripts to determine statistical variation of melt curves and statistical analysis

### Example 3: Analysis of gDNA and cDNA From Cannabis Plants by LAMP Assay

[0504] A representative LAMP assay is described herein (as applied to the LAMP primer sets depicted in Table C). This assay can be performed with any of the LAMP primer sets, with or without the loop primers, provided in Tables 17-35 herein.

[0505] Total RNA, total gDNA, crude FTA extract (nucleic acid from extract from filter paper, such as Whatman, and synthesized cDNA templates were prepared from three distinct genotype/chemotypes of Type I Cannabis plants (de Meijer et al., Genetics, 163(1):335-346 (2003)). The samples were isolated from mid-flower tissue of the plants, and the samples for each of the distinct genotypes/chemotypes are named LPA4, LPA5, and LPA21.3.

[0506] For each of the samples, gDNA, cDNA and FTA crude extracts were subjected to GoTaq PCR reaction (Promega, Madison, WI) using primers B3 and F3 from csTPS37FN LAMP Primer Sets 1, 2 and 3 for the detection of csTPS37FN. Using the B3 and F3 primers from LAMP Primer Set 1 in a GoTaq PCR reaction using LPA005 gDNA, LPA005 cDNA, LPA004 gDNA, LPA004 cDNA, LPA021.3 gDNA, LPA021.3 gDNA, gel electrophoresis analysis showed that the target amplicons of interest are present after PCR as a non-specfic uniform sized ~200 bp amplicon product whether amplified from gDNA, cDNA, or FTA extract input in the LPA005 sample. The amplicon product was absent in LPA004 and LPA021.3 samples from either cDNA or gDNA.

[0507] The csTPS37FN B3/F3 Primer Set 1 target amplicons of interest were each excised from the gel, and the amplicons purified and sequenced by Sanger sequencing; 133 bp of DNA sequence was recovered with a 99.2% consensus agreement (132 bp out of 133 bp) between bands labeled TPS37-1 gDNA (LPA005 gDNA), TPS37-1 cDNA (LPA005 cDNA), and TPS37-1 FTA (LPA005 FTA Extract) samples and the csTPS37FN published reference sequences MK614216.1 and Finola (GCA 003417725.2). A single SNP (C to A) in the alignment was observed in the labeled TPS37-1 gDNA (LPA005 gDNA), TPS37-1 cDNA (LPA005 cDNA), and TPS37-1 FTA (LPA005 FTA Extract) samples relative to the csTPS37FN published reference sequences MK614216.1 and Finola (GCA 003417725.2).

[0508] Using the B3 and F3 primers from LAMP Primer Set 2 in a GoTaq PCR reaction on LPA005 gDNA, LPA005 cDNA, LPA004 gDNA, LPA004 cDNA, LPA021.3 gDNA, LPA021.3 gDNA LPA005 FTA Extract and NTC, as revealed by gel electrophoresis analysis, showed specific detection of distinct sized amplicons at -480 bp for LPA005 gDNA, at ~200 bp for LPA005cDNA, and at ~480 bp for LPA005 FTA extract. Amplicons were absent in LPA004 and LPA021.3 samples from either cDNA or gDNA input. The csTPS37FN B3/F3 Set 2 target amplicons of interest were each excised from the gel, the amplicons purified and sequenced by Sanger sequencing; 415 bp and 414 bp of DNA sequence was recovered from the LPA005 gDNA and LPA005 FTA extract with a 98.5% and 98.3% nucleotide consensus agreement (409 bp and 408 bp out of 415 bp) between the LPA005 gDNA and LPA005 FTA extract bands labeled TPS37-2 gDNA (LPA005 gDNA), TPS37-2 FTA extract (LPA005 FTA extract) and the csTPS37FN published reference sequence from Finola (GCA_003417725.2), while 141 bp of DNA sequence was recovered from the LPA005 cDNA with a 100% nucleotide similarity consensus agreement (141 bp out of 141 bp) between the LPA005 cDNA bands labeled TPS37-2 cDNA (LPA005 cDNA) and the published reference sequence from Finola (GCA_003417725.2).

[0509] Using the B3 and F3 primers from LAMP Primer Set 3, in a GoTaq PCR reaction on LPA005 gDNA, LPA005 cDNA, LPA004 gDNA, LPA004 cDNA, LPA021.3 gDNA, LPA021.3 gDNA LPA005 FTA Extract, and NTC, gel electrophoresis analysis showed specific detection of distinct sized amplicons at ~500 bp for LPA005 gDNA, at ~250 for LPA005cDNA, and at ~500 bp for the LPA005 FTA extract. The target amplicons of interest are present after PCR whether amplified from gDNA, cDNA, or FTA extract from in the LPA005 sample. Amplicons were absent in LPA004 and LPA021.3 samples from either cDNA or gDNA input. The csTPS37FN B3/F3 Set 3 target amplicons of interest were each excised from the gel, the amplicons purified and sequenced by Sanger sequencing; 437 bp and 427 bp of DNA sequence was recovered from the LPA005 gDNA and LPA005 FTA extract with a 98.8% and 96.5% nucleotide similarity consensus agreement (432 bp and 422 bp out of 437 bp) between the LPA005 gDNA and LPA005 FTA extract bands labeled TPS37-3 gDNA (LPA005 gDNA), TPS37-3 FTA extract (LPA005 FTA extract) and the csTPS37FN published reference sequence from Finola (GCA_003417725.2), while 180 bp of DNA sequence was recovered from the LPA005 cDNA with a 100% nucleotide similarity consensus agreement (180 bp out of 180 bp) between the LPA005 cDNA bands labeled TPS37-2 cDNA (LPA005 cDNA) and the published reference sequence from Finola (GCA 003417725.2).

[0510] Using csTPS37FN LAMP Primer Sets 1, 2, and 3, 1 uL of the following input from sample numbers 1) LPA005 gDNA, 2) LPA005, 3) LPA004 gDNA, 4) LPA004 cDNA, 5) LPA021.3 gDNA, 6) LPA021.3 cDNA, 7) LPA005 FTA extract, and 8) NTC were analyzed. The sample set was loaded into a csTPS37FN LAMP based assay detection reaction prepared with NEB WarmStart Colorimetric LAMP Mastermix Mix (New England Biolabs, Ipswich, MA), csTPS37 LAMP Primer sets 1, 2, or 3, and nuclease free water. At time 0, all LAMP reactions are seen as dark grey. After a 45-minute reaction at 65° C., positive LAMP reactions are seen as a pale liquid and negative LAMP reactions are seen as dark grey (FIG. 3). LPA005 gDNA, LPA005 cDNA, LPA004 gDNA, LPA021.3 gDNA, and LPA005 FTA extract are seen as a pale liquid in the LAMP Primer Set 1 reactions and recorded positive; LPA004 cDNA, LPA021.3 cDNA and the negative control are seen as dark grey in the LAMP Primer Set 1 reactions and recorded negative. LPA005 cDNA are seen as pale grey in LAMP Primer Sets 2 and 3 reactions and are recorded positive; LPA005 gDNA, LPA004 gDNA, LPA004 cDNA, LPA021.3 gDNA, LPA004 cDNA, and FTA extract are seen as dark grey in LAMP Primer Sets 2 and 3 reactions and recorded negative. The results demonstrate specific detection of expressed csTPS37FN in LPA5 cDNA using csTPS37FN LAMP Primer Sets 2 and 3. Non-specific detection using csTPS37FN LAMP Primer set 1 was observed in cDNA and FTA extract for LPA005 and gDNA for LPA004, LPA005, and LPA021.3. Positive detection of accumulated amplicon is seen as pale samples rather than dark grey samples.

### Example 4: Correlation of Terpene Synthase Profiles With Chemical Phenotypes of Terpene Distribution in Plants

[0511] High Resolution Melting (HRM) experiments (and one LAMP experiment, see below) were performed using genomic DNA from various Cannabis cultivars. A Master Mix for the HRM reaction reaction was prepared with 2.75 uL LightCycler® 480 High Resolution Melting Master Mix, 0.8 uL of 25 mM MgCl₂, 0.6 uL of primer, and 5 uL of water, with 1 uL of 1 ng/uL Cannabis genomic DNA/water used as template. Samples were tested in duplicate. LPA5 genomic DNA was used as a positive control and water was used as a negative/no template control. The reactions were performed using the following protocol:

[0512] A PCR/HRM reaction was carried out with a ramp rate of at 1.6° C./s and was incubated at 50° C. for 2 minutes, ramped to 95° C. for 10 minutes for 1 time. Then the reaction was cycled through 95° C. for 15 seconds, 68° C. for 30 seconds, and 72° C. for 30 seconds for 40 times, where SYBR fluorescence measurements were captured. This was followed by a melting event at 95° C. for 15 seconds, 60° C. for 1 minute and ramping up at a ramp rate of 0.15° C./s with SYBR fluorescence measurements until reaching 95° C. for 1 second.

[0513] A Tm was measured for each reaction, the peak height was normalized against a threshold detection of Sybr fluorescence, and the data was analyzed and organized into an output based on well, well position, Cannabis sample, target gene/exon, Tm and Melt Peak Height. The results are summarized in FIG. 3.

[0514] Depicted in FIG. 3 is a top panel summarizing the results of the HRM terpene synthase analysis for each Cannabis cultivar, and a bottom panel showing the corresponding terpene chemical phenotypes for each cultivar. In the top panel summarizing the HRM analysis, the Cannabis cultivars/samples are listed along the x-axis at the top (“Blank” = negative control, i.e., water) and the primers tested are displayed along the y axis (under the “Marker” column; note that primer pairs were used to detect each terpene synthase exon indicated so, for example, where TPS37FN 4F is indicated, the 4F and 4R primers (forward and reverse, respectively) were used to detect exon 4 of TPS37FN, TPS2FN3aF means the 3aF and 3aR primers for detecting the 3a exon of TPS2FN were used, and the like). The sequences for each primer pair under the “Marker” column are provided in Table B, except for “TPS37FN Exon 7 LAMP primers,” where LAMP analysis was performed using the LAMP primer set as set forth in Table 17. Results are described as either presence (+) or absent (-) for each primer pair tested. Additionally, the TPS11JL 1F/1R primer pair detected genotype groups identified by their melting peak TPS2FN3aF and the results for that primer set are denoted as either group 1 (1) or group 2 (2).

[0515] The bottom panel of FIG. 3 shows the corresponding terpene distribution of each Cannabis cultivar, as measured by GC-MS; the amount of each terpene is displayed as a percent of sum for each target terpene from the Cannabis samples. The data demonstrates that analysis of the target terpene synthase (TPS) exons tested using primers TPS37 4F/R HRM, TPS37 Exon 7 LAMP, TPS37 8bF/R HRM, TPS37 3F/R HRM, and TPS11JL 1F/R HRM can predict terpinolene as a significant component of the chemical phenotype of plant cultivars having these exons. Additional exon analysis using primers TPS2FN 3aF/R and TPS2FN 4aF/R allow prediction of Cannabis sultivars having alpha pinene as a major component of their chemical phenotype.

[0516] The results further demonstrate the correlation between the specificity of detection of an exon from a functional terpene synthase allele and the prediction of its corresponding terpene profile. For example, Cannabis cultivars in which specific detection of TPS37FN exons 3 and 4 were obtained were found to have terpinolene as a major terpene component. Non-specific detection of TPS37FN exon 2 across all Cannabis cultivar samples tested, however, did not correlate to terpinolene as a major component of the cultivars. A summary of the results is provided below:

[0517] A. “Informative” Exons (i.e., detection of the exons is specific and can be correlated to chemical phenotype, i.e., used to predict terpene composition)

### TPS2FN 3aF/R HRM Validation

[0518] Specificity of functional TPS2FN allele detection was observed with this primer set. Samples with the functional allele were measured with a melting peak of around 76° C., while samples without this allele were not detected, i.e., no fluorescence was measured, nor amplicon produced. The positive control LPA5 cultivar demonstrated presence of the target allele for this genotype. No signal was observed in the negative/NTC (no template control, i.e., water and no plant sample).

### TPS2FN 4aF/R HRM Validation

[0519] Specificity of functional TPS2FN allele detection was observed with this primer set. Samples with the functional allele were measured with a melting peak of around 78° C., while samples without this allele were not detected, i.e., no fluorescence was measured, nor amplicon produced. The positive control LPA5 cultivar demonstrated presence of the target allele for this genotype. No signal was observed in the negative/NTC (no template control, i.e., water and no plant sample).

### TPS11JL 1F/R HRM Validation

[0520] While all Cannabis samples generated a positive signal with this primer set, the specificity of either two melting peaks or one melting peak based on genotypes of TPS11JL exon 1 were observed. Samples with a single melting peak (denoted as Group 1) were measured with a melting peak around 80° C. The positive control LPA5 cultivar showed the presence of the single melting peak, thereby corresponding to the target allele for the “Group 1” genotype. Samples in which the alternate allele was detected (Group 2) showed two melting peaks at around 76° C. and 80° C. No signal was observed in the negative/NTC (no template control, i.e., water and no plant sample).

### TPS37FN 3F/R HRM Validation

[0521] Specificity of functional TPS37FN allele detection was observed with this primer set. Samples with the functional allele were measured with a melting peak of around 75° C., while samples without this allele were not detected, i.e., no fluorescence was measured, nor amplicon produced. The positive control LPA5 cultivar demonstrated presence of the target allele for this genotype. No signal was observed in the negative/NTC (no template control, i.e., water and no plant sample).

### TPS37FN 4F/R HRM Validation

[0522] While most Cannabis samples generated a positive signal with this primer set, the specificity of either one melting peak or multiple melting peaks based on genotypes of the TPS37FN exon 4 were observed. Samples with a single melting peak (denoted as TPS37FN positive group) were measured with a melting peak around 75° C. The positive control LPA5 cultivar showed the presence of the single melting peak, thereby corresponding to the target allele for the genotype denoted as the TPS37FN positive group. Samples in which the alternate allele(s) were detected showed multiple melting peaks at around 73° C., 77° C., 81° C. or 83° C., or no melting peak. No signal was observed in the negative/NTC (no template control, i.e., water and no plant sample).

### TPS37FN Exon 7 LAMP Primers

[0523] Specificity of functional TPS37FN allele detection was observed with this primer set. Samples with the functional allele were measured as a positive colorimetric reaction (yellow), while samples without this allele were detected as a negative colorimetric reaction (pink). The positive control LPA5 cultivar demonstrated presence of the target allele for this genotype (yellow colorimetric reaction). No signal was observed in the negative/NTC (no template control, i.e., water and no plant sample).

### TPS37FN 8bF/R HRM Validation

[0524] Specificity of functional TPS37FN allele detection was observed with this primer set. Samples with the functional allele were measured with a melting peak of around 75° C., while samples without this allele were not detected, i.e., no fluorescence was measured, nor amplicon produced. The positive control LPA5 cultivar demonstrated presence of the target allele for this genotype. No signal was observed in the negative/NTC (no template control, i.e., water and no plant sample).

[0525] B. “Uninformative” Exons (i.e., detection of the exons is non-specific and not always correlated to chemical phenotype, i.e., terpene composition)

### TPS2FN 1aF/R HRM Validation

[0526] All Cannabis cultivar samples were detected with this exon primer set, with the measurement of a single melting peak at or around 75° C. for all samples tested. No specificity was observed for analysis of this allele, with the control LPA5 sample aligning with a conserved genotype for this allele. No signal was observed in the negative/NTC (no template control). No signal was observed in the negative/NTC (no template control, i.e., water and no plant sample).

### TPS11JL 2bF/R HRM Validation

[0527] All Cannabis cultivar samples were detected with this exon primer set, with the measurement of a single melting peak at or around 75° C. for all samples tested. No specificity was observed for analysis of this allele, with the control LPA5 sample aligning with a conserved genotype for this allele. No signal was observed in the negative/NTC (no template control). No signal was observed in the negative/NTC (no template control, i.e., water and no plant sample).

### TPS11JL 3aF/R HRM Validation

[0528] All Cannabis cultivar samples were detected with this exon primer set, with the measurement of a single melting peak at or around 78° C. for all samples tested. No specificity was observed for analysis of this allele, with the control LPA5 sample aligning with a conserved genotype for this allele. No signal was observed in the negative/NTC (no template control). No signal was observed in the negative/NTC (no template control, i.e., water and no plant sample).

### TPS11JL 6F/R HRM Validation

[0529] All Cannabis cultivar samples were detected with this exon primer set, with the measurement of a single melting peak at or around 77° C. for all samples tested. No specificity was observed for analysis of this allele, with the control LPA5 sample aligning with a conserved genotype for this allele. No signal was observed in the negative/NTC (no template control). No signal was observed in the negative/NTC (no template control, i.e., water and no plant sample).

### TPS37FN 2F/R HRM Validation

[0530] All Cannabis cultivar samples were detected with this exon primer set, with the measurement of a single melting peak at or around 77° C. for all samples tested. No specificity was observed for analysis of this allele, with the control LPA5 sample aligning with a conserved genotype for this allele. No signal was observed in the negative/NTC (no template control). No signal was observed in the negative/NTC (no template control, i.e., water and no plant sample).

[0531] The results demonstrate that allele-specific detection of terpene synthases using a multi-exon analysis can provide a robust correlation between the terpene synthase profile of a plant cultivar and its expected chemical phenotype, e.g., terpene composition.

### Example 5: Examples of Embodiments

[0532] A1. A method of identifying/selecting a plant cultivar comprising at least one terpene synthase gene that produces at least one terpene that has an energizing effect on a subject, comprising:
[0533] (a) obtaining a nucleic acid sample from the plant cultivar;
[0534] (b) contacting the nucleic acid sample with at least one polynucleotide primer pair comprising a forward primer and a reverse primer under amplification conditions, thereby preparing a mixture, wherein the polynucleotide primer pair hybridizes to a unique subsequence of at least one terpene synthase gene that produces an energetic terpene product profile comprising at least one terpene that has an energizing effect on a subject, wherein the polynucleotide primer pair comprises at least one polynucleotide primer pair selected from among one or more of:
   [0535] primer group 1 as set forth in Table 1 and the B3/F3 primer pairs set forth in Table 18;
   [0536] primer group 2 as set forth in Table 2 and the B3/F3 primer pairs set forth in Tables 22 and 26;
   [0537] primer group 3 as set forth in Table 3 and the B3/F3 primer pairs set forth in Table 19;
   [0538] primer group 4 as set forth in Table 4 and the B3/F3 primer pairs set forth in Table 23;
   [0539] primer group 12 as set forth in the B3/F3 primer pairs set forth in Table 20;
   [0540] primer group 13 as set forth in the B3/F3 primer pairs set forth in Tables 21;
   [0541] primer group 14 as set forth in the B3/F3 primer pairs set forth in Table 24;
   [0542] primer group 5 as set forth in Table 5 and the B3/F3 primer pairs set forth in Table 28;
   [0543] primer group 6 as set forth in Table 6 and the B3/F3 primer pairs set forth in Table 17;
   [0544] primer group 19 as set forth in Table 16 and the B3/F3 primer pairs set forth in Table 34; and
   [0545] primer group 9 as set forth in Table 9 and the B3/F3 primer pairs set forth in Table 30;
[0546] (c) amplifying the mixture, thereby obtaining an amplified mixture;
[0547] (d) analyzing the amplified mixture of (c), wherein the presence of at least one terpene synthase gene that produces an energetic terpene product profile comprising at least one terpene that has an energizing effect on a subject is identified in the amplified mixture based on the presence of at least one amplified subsequence of the terpene synthase gene; and
[0548] (e) identifying and/or selecting a plant cultivar based on the at least one terpene synthase gene that is identified in (d).

[0549] A1.1 A method of identifying/selecting a plant cultivar, comprising:
[0550] (a) obtaining a nucleic acid sample from the plant cultivar;
[0551] (b) contacting the nucleic acid sample with at least one polynucleotide primer pair comprising a forward primer and a reverse primer under amplification conditions, wherein the polynucleotide primer pair comprises at least one polynucleotide primer pair selected from among one or more of:
   [0552] primer group 1 as set forth in Table 1 and the B3/F3 primer pairs set forth in Table 18;
   [0553] primer group 2 as set forth in Table 2 and the B3/F3 primer pairs set forth in Tables 22 and 26;
   [0554] primer group 3 as set forth in Table 3 and the B3/F3 primer pairs set forth in Table 19;
   [0555] primer group 4 as set forth in Table 4 and the B3/F3 primer pairs set forth in Table 23;
   [0556] primer group 12 as set forth in the B3/F3 primer pairs set forth in Table 20;
   [0557] primer group 13 as set forth in the B3/F3 primer pairs set forth in Tables 21;
   [0558] primer group 14 as set forth in the B3/F3 primer pairs set forth in Table 24;
   [0559] primer group 5 as set forth in Table 5 and the B3/F3 primer pairs set forth in Table 28;
   [0560] primer group 6 as set forth in Table 6 and the B3/F3 primer pairs set forth in Table 17;
   [0561] primer group 19 as set forth in Table 16 and the B3/F3 primer pairs set forth in Table 34; and
   [0562] primer group 9 as set forth in Table 9 and the B3/F3 primer pairs set forth in Table 30;
[0563] (c) amplifying the mixture, thereby obtaining an amplified mixture;
[0564] (d) analyzing the amplified mixture of (c), wherein the presence, absence and/or amount of at least one amplicon generated by at least one polynuceotide primer pair of (b) is identified in the amplified mixture; and
[0565] (e) identifying and/or selecting a plant cultivar based on the presence, absence and/or amount of at the least one amplicon analyzed in (d).

[0566] A1.2. The method of embodiment A1.1, wherein the presence and/or amount of at least one amplicon generated by at least one polynuceotide primer pair of (b) is identified in (d).

[0567] A1.3. The method of embodiment A1.2, wherein the amplicon comprises at least one amplified subsequence of a terpene synthase gene.

[0568] A1.4. The method of embodiment A1.3, wherein the terpene synthase gene produces an energetic terpene product profile comprising at least one terpene that has an energizing effect on a subject.

[0569] A2. A method of identifying/selecting a plant cultivar that does not comprise a terpene synthase gene that produces a terpene that has a sedative effect on a subject or that comprises a terpene synthase gene that produces a decreased amount of a terpene that has a sedative effect on a subject, whereby the terpene production profile has an energizing effect on the subject, the method comprising:
[0570] (a) obtaining a nucleic acid sample from the plant cultivar;
[0571] (b) contacting the nucleic acid sample with at least one polynucleotide primer pair comprising a forward primer and a reverse primer under amplification conditions, thereby preparing a mixture, wherein the polynucleotide primer pair hybridizes to a unique subsequence of at least one terpene synthase gene that produces a sedative terpene product profile comprising at least one terpene that has an sedative effect on a subject, wherein the polynucleotide primer pair comprises at least one polynucleotide primer pair selected from primer group 7, as set forth in Table 7 and the B3/F3 primer pairs set forth in Tables 25 and 30;
[0572] (c) amplifying the mixture, thereby obtaining an amplified mixture;
[0573] (d) analyzing the amplified mixture of (c), wherein the absence of at least one terpene synthase gene that produces a sedative terpene product profile comprising at least one terpene that has a sedative effect on a subject, or the presence of at least one non-functional terpene synthase gene that inhibits or reduces the production of at least one terpene that has a sedative effect on a subject, is identified in the amplified mixture based on the absence of at least one amplified subsequence of the terpene synthase gene; and
[0574] (e) identifying and/or selecting a plant cultivar based on the absence of the least one terpene synthase gene identified in (d) or based on the presence of the at least one non-functional terpene synthase gene identified in (d).

[0575] A2.1. A method of identifying/selecting a plant cultivar, comprising:
[0576] (a) obtaining a nucleic acid sample from the plant cultivar;
[0577] (b) contacting the nucleic acid sample with at least one polynucleotide primer pair comprising a forward primer and a reverse primer under amplification conditions, thereby preparing a mixture, wherein the polynucleotide primer pair comprises at least one polynucleotide primer pair selected from primer group 7, as set forth in Table 7 and the B3/F3 primer pairs set forth in Tables 25 and 30;
[0578] (c) amplifying the mixture, thereby obtaining an amplified mixture;
[0579] (d) analyzing the amplified mixture of (c), wherein the presence, absence and/or amount of at least one amplicon generated by at least one polynuceotide primer pair of (b) is identified in the amplified mixture; and
[0580] (e) identifying and/or selecting a plant cultivar based on the presence, absence and/or amount of at the least one amplicon analyzed in (d).

[0581] A2.2. The method of embodiment A2.1, wherein the presence, absence and/or amount of at least one amplicon generated by at least one polynuceotide primer pair of (b) is identified in (d).

[0582] A2.3. The method of embodiment A2.2, wherein the absence or a reduced amount of at least one amplicon generated by at least one polynuceotide primer pair of (b) is identified in (d).

[0583] A2.4. The method of embodiment A2.2 or A2.3, wherein the identifying and/or selecting in (e) is based on an absence or a reduced amount of at least one amplicon generated by at least one polynuceotide primer pair of (b) identified in (d).

[0584] A2.5. The method of embodiment A2.3 or A2.4, wherein the at least one amplicon is of a terpene synthase gene that produces a sedative terpene product profile comprising at least one terpene that has a sedative effect on a subject.

[0585] A3. A method of preparing nucleic acid from a plant cultivar, comprising:
[0586] (a) obtaining a nucleic acid sample from the plant cultivar;
[0587] (b) contacting the nucleic acid sample with at least one polynucleotide primer pair comprising a forward primer and a reverse primer under amplification conditions, thereby preparing a mixture, wherein the polynucleotide primer pair hybridizes to a unique subsequence of at least one terpene synthase gene that produces an energetic terpene product profile comprising at least one terpene that has an energizing effect on a subject, wherein the polynucleotide primer pair comprises at least one polynucleotide primer pair selected from among one or more of:
   [0588] primer group 1 as set forth in Table 1 and the B3/F3 primer pairs set forth in Table 18;
   [0589] primer group 2 as set forth in Table 2 and the B3/F3 primer pairs set forth in Tables 22 and 26;
   [0590] primer group 3 as set forth in Table 3 and the B3/F3 primer pairs set forth in Table 19;
   [0591] primer group 4 as set forth in Table 4 and the B3/F3 primer pairs set forth in Table 23;
   [0592] primer group 12 as set forth in the B3/F3 primer pairs set forth in Table 20;
   [0593] primer group 13 as set forth in the B3/F3 primer pairs set forth in Tables 21;
   [0594] primer group 14 as set forth in the B3/F3 primer pairs set forth in Table 24;
   [0595] primer group 5 as set forth in Table 5 and the B3/F3 primer pairs set forth in Table 28;
   [0596] primer group 6 as set forth in Table 6 and the B3/F3 primer pairs set forth in Table 17;
   [0597] primer group 19 as set forth in Table 16 and the B3/F3 primer pairs set forth in Table 34; and
   [0598] primer group 9 as set forth in Table 9 and the B3/F3 primer pairs set forth in Table 30;
[0599] (c) amplifying the mixture, thereby obtaining an amplified mixture;
[0600] (d) analyzing the amplified mixture of (c), wherein the presence of at least one terpene synthase gene that produces an energetic terpene product profile comprising at least one terpene that has an energizing effect on a subject is identified in the amplified mixture based on the presence of at least one amplified subsequence of the terpene synthase gene; and
[0601] (e) identifying the amplified mixture analyzed in (d) as comprising prepared nucleic acid comprising at least one terpene synthase gene that produces an energetic terpene product profile comprising at least one terpene that has an energizing effect on a subject.

[0602] A3.1. A method of preparing nucleic acid from a plant cultivar, comprising:
[0603] (a) obtaining a nucleic acid sample from the plant cultivar;
[0604] (b) contacting the nucleic acid sample with at least one polynucleotide primer pair comprising a forward primer and a reverse primer under amplification conditions, wherein the polynucleotide primer pair comprises at least one polynucleotide primer pair selected from among one or more of:
   [0605] primer group 1 as set forth in Table 1 and the B3/F3 primer pairs set forth in Table 18;
   [0606] primer group 2 as set forth in Table 2 and the B3/F3 primer pairs set forth in Tables 22 and 26;
   [0607] primer group 3 as set forth in Table 3 and the B3/F3 primer pairs set forth in Table 19;
   [0608] primer group 4 as set forth in Table 4 and the B3/F3 primer pairs set forth in Table 23;
   [0609] primer group 12 as set forth in the B3/F3 primer pairs set forth in Table 20;
   [0610] primer group 13 as set forth in the B3/F3 primer pairs set forth in Tables 21;
   [0611] primer group 14 as set forth in the B3/F3 primer pairs set forth in Table 24;
   [0612] primer group 5 as set forth in Table 5 and the B3/F3 primer pairs set forth in Table 28;
   [0613] primer group 6 as set forth in Table 6 and the B3/F3 primer pairs set forth in Table 17;
   [0614] primer group 19 as set forth in Table 16 and the B3/F3 primer pairs set forth in Table 34; and
   [0615] primer group 9 as set forth in Table 9 and the B3/F3 primer pairs set forth in Table 30; and
[0616] (c) amplifying the mixture, thereby obtaining an amplified mixture of prepared nucleic acid.

[0617] A3.2. The method of embodiment A3.1, further comprising analyzing the amplified mixture of (c), wherein the presence, absence and/or amount of at least one terpene synthase gene is determined.

[0618] A3.3. The method of embodiment A3.2, wherein the at least one terpene synthase gene produces an energetic terpene product profile comprising at least one terpene that has an energizing effect on a subject.

[0619] A3.4. The method of embodiment A3.3., wherein the presence and/or amount of at least one amplified subsequence of the terpene synthase gene is identified, and the terpene synthase gene produces an energetic terpene product profile comprising at least one terpene that has an energizing effect on a subject.

[0620] A4. A method of preparing nucleic acid from a plant cultivar that does not comprise a terpene synthase gene that produces a terpene that has a sedative effect on a subject or that comprises a terpene synthase gene that produces a decreased amount of a terpene that has a sedative effect on a subject, the method comprising:
[0621] (a) obtaining a nucleic acid sample from the plant cultivar;
[0622] (b) contacting the nucleic acid sample with at least one polynucleotide primer pair comprising a forward primer and a reverse primer under amplification conditions, thereby preparing a mixture, wherein the polynucleotide primer pair hybridizes to a unique subsequence of at least one terpene synthase gene that produces a sedative terpene product profile comprising at least one terpene that has an sedative effect on a subject, wherein the polynucleotide primer pair comprises at least one polynucleotide primer pair selected from primer group 7, as set forth in Table 7 and the B3/F3 primer pairs set forth in Tables 25 and 30;
[0623] (c) amplifying the mixture, thereby obtaining an amplified mixture;
[0624] (d) analyzing the amplified mixture of (c), wherein the absence of at least one terpene synthase gene that produces a sedative terpene product profile comprising at least one terpene that has a sedative effect on a subject, or the presence of at least one non-functional terpene synthase gene that inhibits or reduces the production of at least one terpene that has a sedative effect on a subject, is identified in the amplified mixture based on the absence of at least one amplified subsequence of the terpene synthase gene; and
[0625] (e) identifying the amplified mixture analyzed in (d) as comprising prepared nucleic acid comprising the absence of at least one terpene synthase gene that produces at least one terpene that has s sedative effect or comprises a at least one non-functional terpene synthase gene that produces a reduced amount of at least one terpene that has a sedative effect.

[0626] A4.1. A method of preparing nucleic acid from a plant cultivar, comprising:
[0627] (a) obtaining a nucleic acid sample from the plant cultivar;
[0628] (b) contacting the nucleic acid sample with at least one polynucleotide primer pair comprising a forward primer and a reverse primer under amplification conditions, thereby preparing a mixture, wherein the polynucleotide primer pair comprises at least one polynucleotide primer pair selected from primer group 7, as set forth in Table 7 and the B3/F3 primer pairs set forth in Tables 25 and 30; and
[0629] (c) amplifying the mixture, thereby obtaining an amplified mixture of prepared nucleic acid.

[0630] A4.2. The method of embodiment A4.1, further comprising analyzing the amplified mixture of (c), wherein the presence, absence and/or amount of at least one terpene synthase gene is determined.

[0631] A4.3. The method of embodiment A4.2, wherein the absence or a reduced amount of at least one terpene synthase gene produces a sedative terpene product profile comprising at least one terpene that has a sedative effect on a subject, is identified.

[0632] A4.4. The method of any one of embodiments A2, A2.4, A4, A4.2 or A4.3, wherein the at least one terpene that ha a sedative effect on the subject is R-linalool.

[0633] A5. The method of any one of embodiments A1 to A4.4, wherein the method comprises contacting the nucleic acid of the plant sample with a set of loop mediated isothermal amplification (LAMP) primers under the amplification conditions.

[0634] A6. The method of embodiment A5, wherein the LAMP primer set is selected from among one or more of the primer sets comprising B3, F3, BIP and FIP primers as set forth in each of the sets in Tables 17, 18, 19, 20, 21, 22, 23, 24, 25, 26, 28 and 30.

[0635] A7. The method of embodiment A6, wherein at least one LAMP primer set further comprises a LB loop primer, a LF loop primer, or both a LB loop primer and a LF loop primer.

[0636] A8. The method of embodiment A7, wherein at least one LB loop primer or at least one LF loop primer is set forth in Tables selected from among Tables 17, 18, 19, 20, 21, 22, 23, 24, 25, 26, 28 and 30.

[0637] A8.1. The method of any one of embodiments A1 to A8, wherein the plant is identified and/or selected based on the presence and/or amount of at least one of the following TPS genes: CsTPS2SK, CsTPSSFN, CsTPS30PK and CsTPS32PK, using at least one forward & reverse primer combination from primer groups 1, 2, 3, and 4, whereby the presence of α-pinene is greater than β-pinene.

[0638] A8.2. The method of any one of embodiments A1 to A8.1, wherein the plant is identified and/or selected based on the presence and/or amount of at least one of the following TPS genes: CsTPS6FN, CsTPS13PK, and CsTPS38FN, using at least one forward & reverse primer combination from primer groups 12, 13, and 14 respectively, whereby (Z)/(E)-β-ocimene bioaccumulation is present and/or increased.

[0639] A8.3. The method of any one of embodiments A1 to A8.2, wherein the plant is identified and/or selected based on the presence and/or amount of at least one of the following TPS genes: CsTPS31PK and CsTPS37FN using at least one forward & reverse primer combination from primer groups 5 and 6, respectively, whereby terpinolene bioaccumulation is present and/or increased.

[0640] A8.4. The method of any one of embodiments A1 to A8.3, wherein the plant is identified and/or selected based on the presence and/or amount of the following TPS gene: CsTPS33PK, using at least one forward & reverse primer combination from primer group 19, whereby terpinene (alpha- and gamma-) bioaccumulation is present and/or increased.

[0641] A8.4.1 The method of any one of embodiments A1 to A8.4, wherein the plant is identified and/or selected based on the presence and/or amount of the following TPS gene: CsTPS37LPA5, using at least one forward & reverse primer combination from primer group 6, whereby terpinene (alpha- and/or gamma-) bioaccumulation is present and/or increased.

[0642] A8.4.2 The method of embodiment A8.4.1, wherein the polypeptide encoded by the CsTPS37LPA5 comprises the sequence set forth in SEQ ID NO:1671.

[0643] A8.5. The method of any one of embodiments A1 to A8.4.2, wherein the plant is identified and/or selected based on the presence and/or amount of the following TPS gene: CsTPS18VF, using at least one forward & reverse primer combination from primer group 9, whereby S-Linalool bioaccumulation is present and/or increased.

[0644] A8.6. The method of any one of embodiments A1 to A8.5, wherein the plant is identified and/or selected based on the presence and/or amount of the following TPS gene: CsTPS18Choc, using at least one forward & reverse primer combination from primer group 7, whereby the absence of R-linalool is identified.

[0645] A9. A method of identifying/selecting a plant cultivar comprising at least one terpene synthase gene that produces at least one terpene that has an anti-nociceptive effect on a subject, comprising:
[0646] (a) obtaining a nucleic acid sample from the plant cultivar;
[0647] (b) contacting the nucleic acid sample with at least one polynucleotide primer pair comprising a forward primer and a reverse primer under amplification conditions, thereby preparing a mixture, wherein the polynucleotide primer pair hybridizes to a unique subsequence of at least one terpene synthase gene that produces an anti-nociceptive terpene product profile comprising at least one terpene that has an anti-nociceptive effect on a subject, wherein the polynucleotide primer pair comprises at least one polynucleotide primer pair selected from among one or more of:
   [0648] primer group 1 as set forth in Table 1 and the B3/F3 primer pairs set forth in Table 18;
   [0649] primer group 4 as set forth in Table 4 and the B3/F3 primer pairs set forth in Table 23;
   [0650] primer group 5 as set forth in Table 5 and the B3/F3 primer pairs set forth in Table 28;
   [0651] primer group 6 as set forth in Table 6 and the B3/F3 primer pairs set forth in Table 17;
   [0652] primer group 8 as set forth in Table 8 and the B3/F3 primer pairs set forth in Table 26;
   [0653] primer group 9 as set forth in Table 9 and the B3/F3 primer pairs set forth in Table 30;
   [0654] primer group 10 as set forth in Table 10 and the B3/F3 primer pairs set forth in Table 29; and
   [0655] primer group 11 as set forth in Table 11 and the B3/F3 primer pairs set forth in Table 27;
[0656] (c) amplifying the mixture, thereby obtaining an amplified mixture;
[0657] (d) analyzing the amplified mixture of (c), wherein the presence of at least one terpene synthase gene that produces an anti-nociceptive terpene product profile comprising at least one terpene that has an anti-nociceptive effect on a subject is identified in the amplified mixture based on the presence of at least one amplified subsequence of the terpene synthase gene; and
[0658] (e) identifying and/or selecting a plant cultivar based on the at least one terpene synthase gene that is identified in (d).

[0659] A9.1 A method of identifying/selecting a plant cultivar, comprising:
[0660] (a) obtaining a nucleic acid sample from the plant cultivar;
[0661] (b) contacting the nucleic acid sample with at least one polynucleotide primer pair comprising a forward primer and a reverse primer under amplification conditions, wherein the polynucleotide primer pair comprises at least one polynucleotide primer pair selected from among one or more of:
   [0662] primer group 1 as set forth in Table 1 and the B3/F3 primer pairs set forth in Table 18;
   [0663] primer group 4 as set forth in Table 4 and the B3/F3 primer pairs set forth in Table 23;
   [0664] primer group 5 as set forth in Table 5 and the B3/F3 primer pairs set forth in Table 28;
   [0665] primer group 6 as set forth in Table 6 and the B3/F3 primer pairs set forth in Table 17;
   [0666] primer group 8 as set forth in Table 8 and the B3/F3 primer pairs set forth in Table 26;
   [0667] primer group 9 as set forth in Table 9 and the B3/F3 primer pairs set forth in Table 30;
   [0668] primer group 10 as set forth in Table 10 and the B3/F3 primer pairs set forth in Table 29; and
   [0669] primer group 11 as set forth in Table 11 and the B3/F3 primer pairs set forth in Table 27;
[0670] (c) amplifying the mixture, thereby obtaining an amplified mixture;
[0671] (d) analyzing the amplified mixture of (c), wherein the presence, absence and/or amount of at least one amplicon generated by at least one polynuceotide primer pair of (b) is identified in the amplified mixture; and
[0672] (e) identifying and/or selecting a plant cultivar based on the presence, absence and/or amount of at the least one amplicon analyzed in (d).

[0673] A9.2. The method of embodiment A9.1, wherein the presence and/or amount of at least one amplicon generated by at least one polynuceotide primer pair of (b) is identified in (d).

[0674] A9.3. The method of embodiment A9.2, wherein the amplicon comprises at least one amplified subsequence of a terpene synthase gene.

[0675] A9.4. The method of embodiment A9.3, wherein the terpene synthase gene produces an anti-nociceptive terpene product profile comprising at least one terpene that has an anti-nociceptive effect on a subject.

[0676] A10. A method of preparing nucleic acid from a plant cultivar comprising at least one terpene synthase gene that produces at least one terpene that has an anti-nociceptive effect on a subject, comprising:
[0677] (a) obtaining a nucleic acid sample from the plant cultivar;
[0678] (b) contacting the nucleic acid sample with at least one polynucleotide primer pair comprising a forward primer and a reverse primer under amplification conditions, thereby preparing a mixture, wherein the polynucleotide primer pair hybridizes to a unique subsequence of at least one terpene synthase gene that produces an anti-nociceptive terpene product profile comprising at least one terpene that has an anti-nociceptive effect on a subject, wherein the polynucleotide primer pair comprises at least one polynucleotide primer pair selected from among one or more of:
   [0679] primer group 1 as set forth in Table 1 and the B3/F3 primer pairs set forth in Table 18;
   [0680] primer group 4 as set forth in Table 4 and the B3/F3 primer pairs set forth in Table 23;
   [0681] primer group 5 as set forth in Table 5 and the B3/F3 primer pairs set forth in Table 28;
   [0682] primer group 6 as set forth in Table 6 and the B3/F3 primer pairs set forth in Table 17;
   [0683] primer group 8 as set forth in Table 8 and the B3/F3 primer pairs set forth in Table 26;
   [0684] primer group 9 as set forth in Table 9 and the B3/F3 primer pairs set forth in Table 30;
   [0685] primer group 10 as set forth in Table 10 and the B3/F3 primer pairs set forth in Table 29; and
   [0686] primer group 11 as set forth in Table 11 and the B3/F3 primer pairs set forth in Table 27;
[0687] (c) amplifying the mixture, thereby obtaining an amplified mixture;
[0688] (d) analyzing the amplified mixture of (c), wherein the presence of at least one terpene synthase gene that produces an anti-nociceptive terpene product profile comprising at least one terpene that has an anti-nociceptive effect on a subject is identified in the amplified mixture based on the presence of at least one amplified subsequence of the terpene synthase gene; and
[0689] (e) identifying the amplified mixture analyzed in (d) as comprising prepared nucleic acid comprising at least one terpene synthase gene that produces an anti-nociceptive terpene product profile comprising at least one terpene that has an anti-nociceptive effect on a subject.

[0690] A10.1. A method of preparing nucleic acid from a plant cultivar, comprising:
[0691] (a) obtaining a nucleic acid sample from the plant cultivar;
[0692] (b) contacting the nucleic acid sample with at least one polynucleotide primer pair comprising a forward primer and a reverse primer under amplification conditions, wherein the polynucleotide primer pair comprises at least one polynucleotide primer pair selected from among one or more of:
   [0693] primer group 1 as set forth in Table 1 and the B3/F3 primer pairs set forth in Table 18;
   [0694] primer group 4 as set forth in Table 4 and the B3/F3 primer pairs set forth in Table 23;
   [0695] primer group 5 as set forth in Table 5 and the B3/F3 primer pairs set forth in Table 28;
   [0696] primer group 6 as set forth in Table 6 and the B3/F3 primer pairs set forth in Table 17;
   [0697] primer group 8 as set forth in Table 8 and the B3/F3 primer pairs set forth in Table 26;
   [0698] primer group 9 as set forth in Table 9 and the B3/F3 primer pairs set forth in Table 30;
   [0699] primer group 10 as set forth in Table 10 and the B3/F3 primer pairs set forth in Table 29; and
   [0700] primer group 11 as set forth in Table 11 and the B3/F3 primer pairs set forth in Table 27; and
[0701] (c) amplifying the mixture, thereby obtaining an amplified mixture of prepared nucleic acid.

[0702] A10.2. The method of embodiment A10.1, further comprising analyzing the amplified mixture of (c), wherein the presence, absence and/or amount of at least one terpene synthase gene is determined.

[0703] A10.3. The method of embodiment A10.2, wherein the at least one terpene synthase gene produces an anti-nociceptive terpene product profile comprising at least one terpene that has an anti-nociceptive effect on a subject.

[0704] A10.4. The method of embodiment A10.3., wherein the presence and/or amount of at least one amplified subsequence of the terpene synthase gene is identified, and the terpene synthase gene produces an anti-nociceptive terpene product profile comprising at least one terpene that has an anti-nociceptive effect on a subject.

[0705] A11. The method of any one or embodiments A9 to A10.4, wherein the method comprises contacting the nucleic acid of the plant sample with a set of loop mediated isothermal amplification (LAMP) primers under the amplification conditions.

[0706] A12. The method of embodiment A11, wherein the LAMP primer set is selected from among one or more of the primer sets comprising B3, F3, BIP and FIP primers as set forth in each of the sets in Tables 18, 23, 26, 27, 28, 29 and 30.

[0707] A13. The method of embodiment A12, wherein at least one LAMP primer set further comprises a LB loop primer, a LF loop primer, or both a LB loop primer and a LF loop primer.

[0708] A14. The method of embodiment A13, wherein at least one LB loop primer or at least one LF loop primer is set forth in Tables selected from among Tables 18, 23, 26, 27, 28, 29 and 30.

[0709] A14.1. The method of any one of embodiments A9 to A14, wherein the plant is identified and/or selected based on the presence and/or amount of at least one of the following TPS genes: CsTPS5PK, CsTPS31PK and CsTPS32PK, using at least one forward & reverse primer combination from primer groups 8, 5 and 4, whereby α-bisabolol accumulation is present and/or increased.

[0710] A14.2. The method of any one of embodiments A9 to A14.1, wherein the plant is identified and/or selected based on the presence and/or amount of at least one of the following TPS genes: CsTPS5PK, CsTPS31PK and CsTPS32PK, using at least one forward & reverse primer combination from primer groups 8, 5 and 4, respectively, whereby α-temineol accumulation is present and/or increased.

[0711] A14.3. The method of any one of embodiments A9 to A14.2, wherein the plant is identified and/or selected based on the presence and/or amount of at least one of the following TPS genes: CsTPS18VF, CsTPS19BL and CsTPS35LS, using at least one forward & reverse primer combination from primer groups 9, 10 and 11, respectively, whereby trans-nerolidol accumulation is present and/or increased.

[0712] A14.4. The method of any one of embodiments A9 to A14.3, wherein the plant is identified and/or selected based on the presence and/or amount of at least one of the following TPS genes: CsTPS2K and CsTPS32PK, using at least one forward & reverse primer combination from primer groups 1 and 4, respectively, whereby α-phellandrene accumulation is present and/or increased.

[0713] A14.5. The method of any one of embodiments A9 to A14.4, wherein the plant is identified and/or selected based on the presence and/or amount of the following TPS gene: TPS37LPA5, using at least one forward & reverse primer combination from primer group 6, whereby α-phellandrene accumulation is present and/or increased.

[0714] A14.5.1 The method of embodiment A14.5, wherein the polypeptide encoded by the CsTPS37LPA5 comprises the sequence set forth in SEQ ID NO:1671.

[0715] A15. A method of identifying/selecting a plant cultivar comprising at least one terpene synthase gene that produces at least one terpene that has an insecticidal effect and/or an insect predator attractant in the plant, comprising:
[0716] (a) obtaining a nucleic acid sample from the plant cultivar;
[0717] (b) contacting the nucleic acid sample with at least one polynucleotide primer pair comprising a forward primer and a reverse primer under amplification conditions, thereby preparing a mixture, wherein the polynucleotide primer pair hybridizes to a unique subsequence of at least one terpene synthase gene that produces an insecticidal and/or an insect predator attractant terpene product profile comprising at least one terpene that has an insecticidal and/or an insect predator attractant effect in a plant, wherein the polynucleotide primer pair comprises at least one polynucleotide primer pair selected from among one or more of:
   [0718] primer group 4 as set forth in Table 4 and the B3/F3 primer pairs set forth in Table 23;
   [0719] primer group 5 as set forth in Table 5 and the B3/F3 primer pairs set forth in Table 28;
   [0720] primer group 6 as set forth in Table 6 and the B3/F3 primer pairs set forth in Table 17;
   [0721] primer group 8 as set forth in Table 8 and the B3/F3 primer pairs set forth in Table 26;
   [0722] primer group 9 as set forth in Table 9 and the B3/F3 primer pairs set forth in Table 30;
   [0723] primer group 10 as set forth in Table 10 and the B3/F3 primer pairs set forth in Table 29;
   [0724] primer group 11 as set forth in Table 11 and the B3/F3 primer pairs set forth in Table 27;
   [0725] primer group 16 as set forth in Table 13 and the B3/F3 primer pairs set forth in Table 35;
   [0726] primer group 7 as set forth in Table 7 and the B3/F3 primer pairs set forth in Table 25;
   [0727] primer group 12 as set forth in the B3/F3 primer pairs set forth in Table 20;
   [0728] primer group 13 as set forth in the B3/F3 primer pairs set forth in Tables 21;
   [0729] primer group 14 as set forth in the B3/F3 primer pairs set forth in Table 24;
   [0730] primer group 15 as set forth in Table 12 and the B3/F3 primer pairs set forth in Table 31;
   [0731] primer group 17 as set forth in Table 14 and the B3/F3 primer pairs set forth in Table 32; and
   [0732] primer group 18 as set forth in Table 15 and the B3/F3 primer pairs set forth in Table 33;
[0733] (c) amplifying the mixture, thereby obtaining an amplified mixture;
[0734] (d) analyzing the amplified mixture of (c), wherein the presence of at least one terpene synthase gene that produces an insecticidal product profile and/or an insect predator attractant terpene product profile comprising at least one terpene that has an insecticidal effect and/or an insect predator attractant effect in a plant is identified in the amplified mixture based on the presence of at least one amplified subsequence of the terpene synthase gene; and
[0735] (e) identifying and/or selecting a plant cultivar based on the at least one terpene synthase gene that is identified in (d).

[0736] A15.1. A method of identifying/selecting a plant cultivar, comprising:
[0737] (a) obtaining a nucleic acid sample from the plant cultivar;
[0738] (b) contacting the nucleic acid sample with at least one polynucleotide primer pair comprising a forward primer and a reverse primer under amplification conditions, thereby preparing a mixture, wherein the polynucleotide primer pair comprises at least one polynucleotide primer pair selected from among one or more of:
   [0739] primer group 4 as set forth in Table 4 and the B3/F3 primer pairs set forth in Table 23;
   [0740] primer group 5 as set forth in Table 5 and the B3/F3 primer pairs set forth in Table 28;
   [0741] primer group 6 as set forth in Table 6 and the B3/F3 primer pairs set forth in Table 17;
   [0742] primer group 8 as set forth in Table 8 and the B3/F3 primer pairs set forth in Table 26;
   [0743] primer group 9 as set forth in Table 9 and the B3/F3 primer pairs set forth in Table 30;
   [0744] primer group 10 as set forth in Table 10 and the B3/F3 primer pairs set forth in Table 29;
   [0745] primer group 11 as set forth in Table 11 and the B3/F3 primer pairs set forth in Table 27;
   [0746] primer group 16 as set forth in Table 13 and the B3/F3 primer pairs set forth in Table 35;
   [0747] primer group 7 as set forth in Table 7 and the B3/F3 primer pairs set forth in Table 25;
   [0748] primer group 12 as set forth in the B3/F3 primer pairs set forth in Table 20;
   [0749] primer group 13 as set forth in the B3/F3 primer pairs set forth in Tables 21;
   [0750] primer group 14 as set forth in the B3/F3 primer pairs set forth in Table 24;
   [0751] primer group 15 as set forth in Table 12 and the B3/F3 primer pairs set forth in Table 31;
   [0752] primer group 17 as set forth in Table 14 and the B3/F3 primer pairs set forth in Table 32; and
   [0753] primer group 18 as set forth in Table 15 and the B3/F3 primer pairs set forth in Table 33;
[0754] (c) amplifying the mixture, thereby obtaining an amplified mixture;
[0755] (d) analyzing the amplified mixture of (c), wherein the presence, absence and/or amount of at least one amplicon generated by at least one polynuceotide primer pair of (b) is identified in the amplified mixture; and
[0756] (e) identifying and/or selecting a plant cultivar based on the presence, absence and/or amount of at the least one amplicon analyzed in (d).

[0757] A15.2. The method of embodiment 15.1, wherein the presence and/or amount of at least one amplicon generated by at least one polynuceotide primer pair of (b) is identified in (d).

[0758] A15.3. The method of embodiment 15.2, wherein the amplicon comprises at least one amplified subsequence of a terpene synthase gene.

[0759] A15.4. The method of embodiment 15.3, wherein the terpene synthase gene produces an insecticidal terpene product profile comprising at least one terpene that has an insectidal effect on a subject.

[0760] A16. A method of preparing nucleic acid from a plant cultivar comprising at least one terpene synthase gene that produces at least one terpene that has an insecticidal and/or an insect predator attractant effect in a plant, comprising:
[0761] (a) obtaining a nucleic acid sample from the plant cultivar;
[0762] (b) contacting the nucleic acid sample with at least one polynucleotide primer pair comprising a forward primer and a reverse primer under amplification conditions, thereby preparing a mixture, wherein the polynucleotide primer pair hybridizes to a unique subsequence of at least one terpene synthase gene that produces an insecticidal and/or an insect predator attractant terpene product profile comprising at least one terpene that has an insecticidal and/or an insect predator attractant effect in a plant, wherein the polynucleotide primer pair comprises at least one polynucleotide primer pair selected from among one or more of:
   [0763] primer group 4 as set forth in Table 4 and the B3/F3 primer pairs set forth in Table 23;
   [0764] primer group 5 as set forth in Table 5 and the B3/F3 primer pairs set forth in Table 28;
   [0765] primer group 6 as set forth in Table 6 and the B3/F3 primer pairs set forth in Table 17;
   [0766] primer group 8 as set forth in Table 8 and the B3/F3 primer pairs set forth in Table 26;
   [0767] primer group 9 as set forth in Table 9 and the B3/F3 primer pairs set forth in Table 30;
   [0768] primer group 10 as set forth in Table 10 and the B3/F3 primer pairs set forth in Table 29;
   [0769] primer group 11 as set forth in Table 11 and the B3/F3 primer pairs set forth in Table 27;
   [0770] primer group 16 as set forth in Table 13 and the B3/F3 primer pairs set forth in Table 35;
   [0771] primer group 7 as set forth in Table 7 and the B3/F3 primer pairs set forth in Table 25;
   [0772] primer group 12 as set forth in the B3/F3 primer pairs set forth in Table 20;
   [0773] primer group 13 as set forth in the B3/F3 primer pairs set forth in Tables 21;
   [0774] primer group 14 as set forth in the B3/F3 primer pairs set forth in Table 24;
   [0775] primer group 15 as set forth in Table 12 and the B3/F3 primer pairs set forth in Table 31;
   [0776] primer group 17 as set forth in Table 14 and the B3/F3 primer pairs set forth in Table 32; and
   [0777] primer group 18 as set forth in Table 15 and the B3/F3 primer pairs set forth in Table 33;
[0778] (c) amplifying the mixture, thereby obtaining an amplified mixture;
[0779] (d) analyzing the amplified mixture of (c), wherein the presence of at least one terpene synthase gene that produces an insecticidal terpene product profile and/or an insect predator attractant terpene product profile comprising at least one terpene that has an insecticidal effect insect predator attractant effect in a plant is identified in the amplified mixture based on the presence of at least one amplified subsequence of the terpene synthase gene; and
[0780] (e) identifying the amplified mixture analyzed in (d) as comprising prepared nucleic acid comprising at least one terpene synthase gene that produces an insecticidal terpene product profile and/or an insect predator attractant terpene product profile comprising at least one terpene that has an insecticidal effect and/or an insect predator attractant effect in a plant.

[0781] A16.1 A method of preparing nucleic acid from a plant cultivar, comprising:
[0782] (a) obtaining a nucleic acid sample from the plant cultivar;
[0783] (b) contacting the nucleic acid sample with at least one polynucleotide primer pair comprising a forward primer and a reverse primer under amplification conditions, thereby preparing a mixture, wherein the polynucleotide primer pair comprises at least one polynucleotide primer pair selected from among one or more of:
   [0784] primer group 4 as set forth in Table 4 and the B3/F3 primer pairs set forth in Table 23;
   [0785] primer group 5 as set forth in Table 5 and the B3/F3 primer pairs set forth in Table 28;
   [0786] primer group 8 as set forth in Table 8 and the B3/F3 primer pairs set forth in Table 26;
   [0787] primer group 9 as set forth in Table 9 and the B3/F3 primer pairs set forth in Table 30;
   [0788] primer group 10 as set forth in Table 10 and the B3/F3 primer pairs set forth in Table 29;
   [0789] primer group 11 as set forth in Table 11 and the B3/F3 primer pairs set forth in Table 27;
   [0790] primer group 16 as set forth in Table 13 and the B3/F3 primer pairs set forth in Table 35;
   [0791] primer group 7 as set forth in Table 7 and the B3/F3 primer pairs set forth in Table 25;
   [0792] primer group 12 as set forth in the B3/F3 primer pairs set forth in Table 20;
   [0793] primer group 13 as set forth in the B3/F3 primer pairs set forth in Tables 21;
   [0794] primer group 14 as set forth in the B3/F3 primer pairs set forth in Table 24;
   [0795] primer group 15 as set forth in Table 12 and the B3/F3 primer pairs set forth in Table 31;
   [0796] primer group 17 as set forth in Table 14 and the B3/F3 primer pairs set forth in Table 32; and
   [0797] primer group 18 as set forth in Table 15 and the B3/F3 primer pairs set forth in Table 33; and
[0798] (c) amplifying the mixture, thereby obtaining an amplified mixture of prepared nucleic acid.

[0799] A16.2. The method of embodiment A16.1, further comprising analyzing the amplified mixture of (c), wherein the presence, absence and/or amount of at least one terpene synthase gene is determined.

[0800] A16.3. The method of embodiment A16.2, wherein the at least one terpene synthase gene produces an insecticidal terpene product profile comprising at least one terpene that has an insecticidal effect in a plant.

[0801] A16.4. The method of embodiment A16.3., wherein the presence and/or amount of at least one amplified subsequence of the terpene synthase gene is identified, and the terpene synthase gene produces an insecticidal terpene product profile comprising at least one terpene that has an insecticidal effect in a plant cultivar.

[0802] A16.5 The method of any one of embodiments A15 to A16.4, wherein the plant is identified and/or selected based on the presence and/or amount of the following TPS gene: CsTPS37LPA5, using at least one forward & reverse primer combination from primer group 6, whereby 3-carene bioaccumulation is present and/or increased.

[0803] A16.6 The method of embodiment A16.5, wherein the polypeptide encoded by the CsTPS37LPA5 comprises the sequence set forth in SEQ ID NO:1671.

[0804] A16.7 The method of any one of embodiments A15 to A16.6, wherein the plant is identified and/or selected based on the presence and/or amount of the following TPS gene: CsTPS20LPA5, using at least one forward & reverse primer combination from primer group 6, whereby guaiol bioaccumulation is present and/or increased.

[0805] A16.8 The method of embodiment A16.7, wherein the TPS20LPA5 polypeptide is encoded by the nucleotide sequence set forth in SEQ ID NO:1408.

[0806] A17. The method of any one of embodiments A15 to A16.4, wherein the method comprises contacting the nucleic acid of the plant sample with a set of loop mediated isothermal amplification (LAMP) primers under the amplification conditions.

[0807] A18. The method of embodiment A17, wherein the LAMP primer set is selected from among one or more of the primer sets comprising B3, F3, BIP and FIP primers as set forth in each of the sets in Tables 23, 28, 26, 30, 29, 27, 35, 25, 20, 21, 24, 31, 32 and 33.

[0808] A19. The method of embodiment A18, wherein at least one LAMP primer set further comprises a LB loop primer, a LF loop primer, or both a LB loop primer and a LF loop primer.

[0809] A20. The method of embodiment A19, wherein at least one LB loop primer or at least one LF loop primer is set forth in Tables selected from among Tables 23, 28, 26, 30, 29, 27, 35, 25, 20, 21, 24, 31, 32 and 33.

[0810] A20.1. The method of any one of embodiments A15 to A20, wherein the plant is identified and/or selected based on the presence and/or amount of the following TPS gene: a guiaol synthase, using at least one forward & reverse primer combination from primer group 16, whereby guaiol bioaccumulation is present and/or increased.

[0811] A20.2. The method of any one of embodiments A15 to A20.1, wherein the plant is identified and/or selected based on the presence and/or amount of at least one of the following TPS genes: CsTPS18VF, CsTPS19BL, CsTPS35LS, CsTPS18Choc, CsTPS29BC, and/or CsTPS17AK, using at least one forward & reverse primer combination from primer groups 9, 10, 11, 7, 17 and 18, respectively, whereby linalool bioaccumulation is present and/or increased.

[0812] A20.3. The method of any one of embodiments A15 to A20.2, wherein the plant is identified and/or selected based on the presence and/or amount of at least one of the following TPS genes: CsTPS32PK and/or CsTPS25LS, using at least one forward & reverse primer combination from primer groups 4 and 15 respectively, whereby β-Farnescene bioaccumulation is present and/or increased.

[0813] A20.4. The method of any one of embodiments A15 to A20.3, wherein the plant is identified and/or selected based on the presence and/or amount of at least one of the following TPS genes: CsTPS6FN, CsTPS13PK, and CsTPS38FN using at least one forward & reverse primer combination from primer groups 12, 13, and 14 respectively, whereby beta ocimene bioaccumulation is present and/or increased.

[0814] A20.5. The method of any one of embodiments A15 to A20.4, wherein the plant is identified and/or selected based on the presence and/or amount of at least one of the following TPS genes: CsTPS18VF, CsTPS19BL, and CsTPS35LS using at least one forward & reverse primer combination from primer groups 9, 10, and 11, respectively, whereby trans nerolidol bioaccumulation is present and/or increased.

[0815] A20.6. The method of any one of embodiments A15 to A20.5, wherein the plant is identified and/or selected based on the presence and/or amount of at least one of the following TPS genes: CsTPS5PK, CsTPS31PK and CsTPS32PK, using at least one forward & reverse primer combination from primer group 8, 5 and 4, whereby alpha bisabolol bioaccumulation is present and/or increased.

[0816] A20.7. The method of any one of embodiments A15 to A20.6, wherein the plant is identified and/or selected based on the presence and/or amount of at least one of the following TPS genes: CsTPS5PK, CsTPS31PK and CsTPS32PK, using at least one forward & reverse primer combination from primer group 8, 5 and 4, respectively, whereby α-terpineol bioaccumulation is present and/or increased.

[0817] A21. The method of any one of embodiments A1 to A20.7, wherein one or more plant cultivars is/are of the family Rosidae.

[0818] A22. The method of any one of embodiments A1 to A21, wherein one or more plant cultivars is/are a Cannabis cultivar.

[0819] A23. A plant cultivar, identified and/or selected by the method of any one of embodiments A1 to A22.

[0820] B1. A method of producing a daughter plant cultivar, comprising:
[0821] analyzing two or more parent plant cultivars by the method of any one of embodiments A1 to A22;
[0822] identifying and selecting two or more plant cultivars comprising at least one teroene synthase that produces at least one terpene that has one or more of: an energizing effect on a subject, an anti-nociceptive effect on a subject, or an insecticidal effect and/or an insect predator attractant effect in a plant; and
[0823] inbreeding or outcrossing the parent plant cultivars to produce a daughter plant cultivar. B2. The method of embodiment B1, wherein at least one parent plant cultivar is a Cannabis cultivar, or both parent plant cultivars are Cannabis cultivars.

[0824] B3. The method of embodiment B1, wherein at least one parent plant cultivar is of the family Rosidae, or both plant cultivars are of the family Rosidae.

[0825] C1. A method of treating a subject with one or more plant cultivars or a portion thereof or an extract thereof, comprising:
[0826] (i) obtaining one or more plant cultivars or samples therefrom;
[0827] (ii) preparing or analyzing nucleic acid from the one or more plant cultivars according to the method of any one of embodiments A1 to A22;
[0828] (iii) based on (ii), identifying one or more plant cultivars as desirable for treating a subject or as not desirable for treating a subject; and
[0829] (iv) if one or more plant cultivars are identified as desirable for treating a subject in (iii), treating the subject with the one or more plant cultivars identified according to (iii), or with a portion thereof, or with an extract thereof.

[0830] C2. The method of embodiment C1, wherein the treatment characteristic identified in (iii) is energetic or anti-nociceptive, or a combination thereof.

[0831] C3. A method of imparting insect resistance to one or more plant cultivars, comprising:
[0832] (i) obtaining one or more plant cultivars or samples therefrom;
[0833] (ii) preparing or analyzing nucleic acid from the one or more plant cultivars according to the method of any one of embodiments A15 to A22;
[0834] (iii) based on (ii), identifying one or more plant cultivars as desirable for imparting insect resistance; and
[0835] (iv) cultivating the one or more plant cultivars as a crop, or for breeding daughter cultivars that are insect resistant.

[0836] C4. The method of embodiment C3, wherein the insect resistance comprises contact resistance or fumigant properties, or a combination thereof.

[0837] D1. A composition, comprising at least one polynucleotide primer pair selected from among the primer pairs set forth in Tables 1-16 and/or from among the B3/F3 primer pairs set forth in Tables 17-35, and/or from among sequences that share 90%, 91%, 92%, 93%, 94%, 95%, 96%, 97%, 98%, 99% or more sequence identity with one or more of the primer sequences set forth in Tables 1-16 and/or the B3 and/or F3 primer sequences set forth in Tables 17-35.

[0838] D1.1. A composition, comprising an amplicon generated by amplification of a target sequence of at least one polynucleotide primer pair selected from among the primer pairs set forth in Tables 1-16, and/or an amplicon generated by amplification of a target sequence of at least one of the B3/F3 primer pairs set forth in Tables 17-35, and/or an amplicon generated by amplification of a target sequence of at least one primer pair wherein at least one primer of the primer pair is selected from among sequences that share 90%, 91%, 92%, 93%, 94%, 95%, 96%, 97%, 98%, 99% or more sequence identity with one or more of the primer sequences set forth in Tables 1-16 and/or the B3 and/or F3 primer sequences set forth in Tables 17-35.

[0839] D2. The composition of embodiment D1, comprising more than one polynucleotide primer pair, wherein the more than one polynucleotide primer pairs belong to the same primer group selected from among primer group 1 in Table 1, primer group 2 in Table 2, primer group 3 in Table 3, primer group 4 in Table 4, primer group 5 in Table 5, primer group 6 in Table 6, primer group 7 in Table 7, primer group 8 in Table 8, primer group 9 in Table 9, primer group 10 in Table 10, primer group 11 in Table 11, primer group 15 in Table 12, primer group 16 in Table 13, primer group 17 in Table 14, primer group 18 in Table 15 and primer group 19 in Table 16, and/or from among groups of sequences that share 90%, 91%, 92%, 93%, 94%, 95%, 96%, 97%, 98%, 99% or more sequence identity with one or more of the primer sequences of the groups set forth in Tables 1-16.

[0840] D2.1 The composition of embodiment D1.1, comprising one or more amplicons generated from more than one polynucleotide primer pair, the more than one polynucleotide primer pairs belong to the same primer group selected from among primer group 1 in Table 1, primer group 2 in Table 2, primer group 3 in Table 3, primer group 4 in Table 4, primer group 5 in Table 5, primer group 6 in Table 6, primer group 7 in Table 7, primer group 8 in Table 8, primer group 9 in Table 9, primer group 10 in Table 10, primer group 11 in Table 11, primer group 15 in Table 12, primer group 16 in Table 13, primer group 17 in Table 14, primer group 18 in Table 15 and primer group 19 in Table 16, and/or from among groups of sequences that share 90%, 91%, 92%, 93%, 94%, 95%, 96%, 97%, 98%, 99% or more sequence identity with one or more of the primer sequences of the groups set forth in Tables 1-16.

[0841] D2.2. The composition of any one of embodiments D1 to D2.1, further comprising at least one probe for qPCR or RT-qPCR.

[0842] D3. A composition, comprising at least one set of B3, F3, BIP and FIP polynucleotide primer pairs selected from among the primer pairs set forth in Tables 17-35 and/or from among sequences that share 90%, 91%, 92%, 93%, 94%, 95%, 96%, 97%, 98%, 99% or more sequence identity with one or more of the B3, F3, BIP and FIP primer sequences set forth in Tables 17-35.

[0843] D4. The composition of embodiment D3, further comprising a LF loop primer, a LB loop primer, or both a LF loop primer and a LB loop primer, and/or from among sequences that share 90%, 91%, 92%, 93%, 94%, 95%, 96%, 97%, 98%, 99% or more sequence identity with one or both of the LF loop primer and the LB loop primer.

[0844] D5. The composition of embodiment D4, wherein the LF loop primer, the LB loop primer, or both the LF loop primer and the LB loop primer are selected from among those set forth in one or more of Tables 17-35.

[0845] D6. The composition of any one of embodiments D1 to D5, wherein at least one primer or at least one amplicon comprises a nucleotide analog or a detectable label.

[0846] E1. A kit, comprising the composition of embodiment D1 or embodiment D2, reagents for nucleic acid amplification, and, optionally, instructions for use.

[0847] E2. The kit of embodiment E1, further comprising reagents for HRM.

[0848] E2.1. The kit of embodiment E1 or E2, further comprising a probe for qPCR or RT-qPCR.

[0849] E3. A kit, comprising the composition of any one of embodiments D3 to D5, reagents for nucleic acid amplification, and, optionally, instructions for use.

[0850] E4. The kit of embodiment E3, further comprising reagents for LAMP.

[0851] F1. An isolated terpene synthase from a Cannabis plant cultivar, wherein the terpene synthase produces guaiol.

[0852] F2. An isolated nucleic acid encoding the terpene synthase of embodiment F1.

[0853] F3. The isolated nucleic acid of embodiment F2, comprising the sequence set forth in SEQ ID NO:1408.

[0854] F4. A vector, comprising the isolated nucleic acid of embodiment F2 or embodiment F3.

[0855] F5. A cell comprising the vector of embodiment F4.

[0856] F6. The cell of embodiment F5, wherein the vector is an expression vector.

[0857] The entirety of each patent, patent application, publication and document referenced herein hereby is incorporated by reference. Citation of the above patents, patent applications, publications and documents is not an admission that any of the foregoing is pertinent prior art, nor does it constitute any admission as to the contents or date of these publications or documents. Their citation is not an indication of a search for relevant disclosures. All statements regarding the date(s) or contents of the documents is based on available information and is not an admission as to their accuracy or correctness.

[0858] Modifications can be made to the foregoing without departing from the basic aspects of the technology. Although the technology has been described in substantial detail with reference to one or more specific embodiments, those of ordinary skill in the art will recognize that changes may be made to the embodiments specifically disclosed in this application, yet these modifications and improvements are within the scope and spirit of the technology.

[0859] The technology illustratively described herein suitably may be practiced in the absence of any element(s) not specifically disclosed herein. Thus, for example, in each instance herein any of the terms “comprising,” “consisting essentially of,” and “consisting of” may be replaced with either of the other two terms. The terms and expressions which have been employed are used as terms of description and not of limitation and use of such terms and expressions do not exclude any equivalents of the features shown and described or portions thereof, and various modifications are possible within the scope of the technology claimed. The term “a” or “an” can refer to one of or a plurality of the elements it modifies (e.g., “a reagent” can mean one or more reagents) unless it is contextually clear either one of the elements or more than one of the elements is described. The term “about” as used herein refers to a value within 10% of the underlying parameter (i.e., plus or minus 10%), and use of the term “about” at the beginning of a string of values modifies each of the values (i.e., “about 1, 2 and 3” refers to about 1, about 2 and about 3). For example, a weight of “about 100 grams” can include weights between 90 grams and 110 grams. Further, when a listing of values is described herein (e.g., about 50%, 60%, 70%, 80%, 85% or 86%) the listing includes all intermediate and fractional values thereof (e.g., 54%, 85.4%). Thus, it should be understood that although the present technology has been specifically disclosed by representative embodiments and optional features, modification and variation of the concepts herein disclosed may be resorted to by those skilled in the art, and such modifications and variations are considered within the scope of this technology.

[0860] Certain embodiments of the technology are set forth in the claims that follow:

The application's sequence listing, which the Patent Office published only in electronic form, follows.

SEQUENCE LISTING (1671 sequences)

SEQ ID NO: 1 - DNA, 23 bp, synthetic construct
  misc_feature 1..23: note = Description of Artificial Sequence: Synthetic primer
  source 1..23: mol_type = other DNA
atattcaaagatcaaccagcagc

SEQ ID NO: 2 - DNA, 22 bp, synthetic construct
  misc_feature 1..22: note = Description of Artificial Sequence: Synthetic primer
  source 1..22: mol_type = other DNA
tgtgggtttgtagttgcctgat

SEQ ID NO: 3 - DNA, 25 bp, synthetic construct
  misc_feature 1..25: note = Description of Artificial Sequence: Synthetic primer
  source 1..25: mol_type = other DNA
agctatgggaaaagaatcaatgagc

SEQ ID NO: 4 - DNA, 23 bp, synthetic construct
  misc_feature 1..23: note = Description of Artificial Sequence: Synthetic primer
  source 1..23: mol_type = other DNA
gagtttgaaatgaagagcagtgg

SEQ ID NO: 5 - DNA, 25 bp, synthetic construct
  misc_feature 1..25: note = Description of Artificial Sequence: Synthetic primer
  source 1..25: mol_type = other DNA
gaggctgaaaatcctttagttaagc

SEQ ID NO: 6 - DNA, 27 bp, synthetic construct
  misc_feature 1..27: note = Description of Artificial Sequence: Synthetic primer
  source 1..27: mol_type = other DNA
acaggactgaatccatattgtctaagg

SEQ ID NO: 7 - DNA, 25 bp, synthetic construct
  misc_feature 1..25: note = Description of Artificial Sequence: Synthetic primer
  source 1..25: mol_type = other DNA
agatgaagcaagagatttcacaacc

SEQ ID NO: 8 - DNA, 22 bp, synthetic construct
  misc_feature 1..22: note = Description of Artificial Sequence: Synthetic primer
  source 1..22: mol_type = other DNA
aatggagtggaagatccaaggc

SEQ ID NO: 9 - DNA, 21 bp, synthetic construct
  misc_feature 1..21: note = Description of Artificial Sequence: Synthetic primer
  source 1..21: mol_type = other DNA
atgccttggatcttccactcc

SEQ ID NO: 10 - DNA, 23 bp, synthetic construct
  misc_feature 1..23: note = Description of Artificial Sequence: Synthetic primer
  source 1..23: mol_type = other DNA
ctttttggtatgctgactgaacg

SEQ ID NO: 11 - DNA, 24 bp, synthetic construct
  misc_feature 1..24: note = Description of Artificial Sequence: Synthetic primer
  source 1..24: mol_type = other DNA
catttgctagagacagagtagtgg

SEQ ID NO: 12 - DNA, 22 bp, synthetic construct
  misc_feature 1..22: note = Description of Artificial Sequence: Synthetic primer
  source 1..22: mol_type = other DNA
gctgaagctcatctagtgtacc

SEQ ID NO: 13 - DNA, 20 bp, synthetic construct
  misc_feature 1..20: note = Description of Artificial Sequence: Synthetic primer
  source 1..20: mol_type = other DNA
tgaactggatcagctacccg

SEQ ID NO: 14 - DNA, 24 bp, synthetic construct
  misc_feature 1..24: note = Description of Artificial Sequence: Synthetic primer
  source 1..24: mol_type = other DNA
gtgtgaatcccattttctttgagg

SEQ ID NO: 15 - DNA, 22 bp, synthetic construct
  misc_feature 1..22: note = Description of Artificial Sequence: Synthetic primer
  source 1..22: mol_type = other DNA
gttgggtgatctgtgtaaatgc

SEQ ID NO: 16 - DNA, 22 bp, synthetic construct
  misc_feature 1..22: note = Description of Artificial Sequence: Synthetic primer
  source 1..22: mol_type = other DNA
ctgagacacgtaaaatggttgg

SEQ ID NO: 17 - DNA, 20 bp, synthetic construct
  misc_feature 1..20: note = Description of Artificial Sequence: Synthetic primer
  source 1..20: mol_type = other DNA
tgctacatgcgtgaaaaggg

SEQ ID NO: 18 - DNA, 22 bp, synthetic construct
  misc_feature 1..22: note = Description of Artificial Sequence: Synthetic primer
  source 1..22: mol_type = other DNA
tgtggtacatctccattgctcc

SEQ ID NO: 19 - DNA, 22 bp, synthetic construct
  misc_feature 1..22: note = Description of Artificial Sequence: Synthetic primer
  source 1..22: mol_type = other DNA
atgtgctgtggtcaatagttct

SEQ ID NO: 20 - DNA, 21 bp, synthetic construct
  misc_feature 1..21: note = Description of Artificial Sequence: Synthetic primer
  source 1..21: mol_type = other DNA
aaagaccaaatggagggctca

SEQ ID NO: 21 - DNA, 22 bp, synthetic construct
  misc_feature 1..22: note = Description of Artificial Sequence: Synthetic primer
  source 1..22: mol_type = other DNA
acaggtcgagtcaaagaattgg

SEQ ID NO: 22 - DNA, 20 bp, synthetic construct
  misc_feature 1..20: note = Description of Artificial Sequence: Synthetic primer
  source 1..20: mol_type = other DNA
gccatgttgacgtagaagcc

SEQ ID NO: 23 - DNA, 26 bp, synthetic construct
  misc_feature 1..26: note = Description of Artificial Sequence: Synthetic primer
  source 1..26: mol_type = other DNA
aggaagagataggaaaaatcaaagcg

SEQ ID NO: 24 - DNA, 20 bp, synthetic construct
  misc_feature 1..20: note = Description of Artificial Sequence: Synthetic primer
  source 1..20: mol_type = other DNA
gcgtcgatgaaccacttagc

SEQ ID NO: 25 - DNA, 27 bp, synthetic construct
  misc_feature 1..27: note = Description of Artificial Sequence: Synthetic primer
  source 1..27: mol_type = other DNA
taaggaagagataggaaaaatcaaagc

SEQ ID NO: 26 - DNA, 22 bp, synthetic construct
  misc_feature 1..22: note = Description of Artificial Sequence: Synthetic primer
  source 1..22: mol_type = other DNA
ttgtagtcctccgatgaagtgg

SEQ ID NO: 27 - DNA, 22 bp, synthetic construct
  misc_feature 1..22: note = Description of Artificial Sequence: Synthetic primer
  source 1..22: mol_type = other DNA
tggaggcatactaaacttgggg

SEQ ID NO: 28 - DNA, 24 bp, synthetic construct
  misc_feature 1..24: note = Description of Artificial Sequence: Synthetic primer
  source 1..24: mol_type = other DNA
aagctctaattcatccaatgttcc

SEQ ID NO: 29 - DNA, 27 bp, synthetic construct
  misc_feature 1..27: note = Description of Artificial Sequence: Synthetic primer
  source 1..27: mol_type = other DNA
gatgggatatggaaatgataaatgagt

SEQ ID NO: 30 - DNA, 23 bp, synthetic construct
  misc_feature 1..23: note = Description of Artificial Sequence: Synthetic primer
  source 1..23: mol_type = other DNA
tgttgatggagatgtgttggtct

SEQ ID NO: 31 - DNA, 20 bp, synthetic construct
  misc_feature 1..20: note = Description of Artificial Sequence: Synthetic primer
  source 1..20: mol_type = other DNA
ggatttcagtgggagcaccg

SEQ ID NO: 32 - DNA, 22 bp, synthetic construct
  misc_feature 1..22: note = Description of Artificial Sequence: Synthetic primer
  source 1..22: mol_type = other DNA
gcactatgacgaattatggcgg

SEQ ID NO: 33 - DNA, 20 bp, synthetic construct
  misc_feature 1..20: note = Description of Artificial Sequence: Synthetic primer
  source 1..20: mol_type = other DNA
tgaaaagaggtgatgctccg

SEQ ID NO: 34 - DNA, 24 bp, synthetic construct
  misc_feature 1..24: note = Description of Artificial Sequence: Synthetic primer
  source 1..24: mol_type = other DNA
ccatgctgatacatgaaaaatccc

SEQ ID NO: 35 - DNA, 29 bp, synthetic construct
  misc_feature 1..29: note = Description of Artificial Sequence: Synthetic primer
  source 1..29: mol_type = other DNA
atccttaatactacaaaattagcaagagc

SEQ ID NO: 36 - DNA, 27 bp, synthetic construct
  misc_feature 1..27: note = Description of Artificial Sequence: Synthetic primer
  source 1..27: mol_type = other DNA
aatgtaatcaaaagaccaaatgggagg

SEQ ID NO: 37 - DNA, 23 bp, synthetic construct
  misc_feature 1..23: note = Description of Artificial Sequence: Synthetic primer
  source 1..23: mol_type = other DNA
agtagattgaatgagctagaggc

SEQ ID NO: 38 - DNA, 18 bp, synthetic construct
  misc_feature 1..18: note = Description of Artificial Sequence: Synthetic primer
  source 1..18: mol_type = other DNA
aattcgagagctgtggcg

SEQ ID NO: 39 - DNA, 22 bp, synthetic construct
  misc_feature 1..22: note = Description of Artificial Sequence: Synthetic primer
  source 1..22: mol_type = other DNA
aagcaagttcaaggcaagaacg

SEQ ID NO: 40 - DNA, 22 bp, synthetic construct
  misc_feature 1..22: note = Description of Artificial Sequence: Synthetic primer
  source 1..22: mol_type = other DNA
gatggtttgtttcgctccatcg

SEQ ID NO: 41 - DNA, 23 bp, synthetic construct
  misc_feature 1..23: note = Description of Artificial Sequence: Synthetic primer
  source 1..23: mol_type = other DNA
ggagtgtttcttatggactgtgg

SEQ ID NO: 42 - DNA, 27 bp, synthetic construct
  misc_feature 1..27: note = Description of Artificial Sequence: Synthetic primer
  source 1..27: mol_type = other DNA
gaaaagctctaattcctccaatgttcc

SEQ ID NO: 43 - DNA, 24 bp, synthetic construct
  misc_feature 1..24: note = Description of Artificial Sequence: Synthetic primer
  source 1..24: mol_type = other DNA
tgtgaaagcaatggatgatttacc

SEQ ID NO: 44 - DNA, 23 bp, synthetic construct
  misc_feature 1..23: note = Description of Artificial Sequence: Synthetic primer
  source 1..23: mol_type = other DNA
aattttggtgtcctaacacatcg

SEQ ID NO: 45 - DNA, 25 bp, synthetic construct
  misc_feature 1..25: note = Description of Artificial Sequence: Synthetic primer
  source 1..25: mol_type = other DNA
tctgtaaacatcaattacaagaggc

SEQ ID NO: 46 - DNA, 21 bp, synthetic construct
  misc_feature 1..21: note = Description of Artificial Sequence: Synthetic primer
  source 1..21: mol_type = other DNA
tcggtcctgataccgaaatcc

SEQ ID NO: 47 - DNA, 22 bp, synthetic construct
  misc_feature 1..22: note = Description of Artificial Sequence: Synthetic primer
  source 1..22: mol_type = other DNA
atggatttcggtatcaggaccg

SEQ ID NO: 48 - DNA, 24 bp, synthetic construct
  misc_feature 1..24: note = Description of Artificial Sequence: Synthetic primer
  source 1..24: mol_type = other DNA
catctgtaagtcgtagaatcatgg

SEQ ID NO: 49 - DNA, 27 bp, synthetic construct
  misc_feature 1..27: note = Description of Artificial Sequence: Synthetic primer
  source 1..27: mol_type = other DNA
taatgaagatgaaaatatggactctcc

SEQ ID NO: 50 - DNA, 26 bp, synthetic construct
  misc_feature 1..26: note = Description of Artificial Sequence: Synthetic primer
  source 1..26: mol_type = other DNA
gataaactatcctgagaagcatgtcc

SEQ ID NO: 51 - DNA, 23 bp, synthetic construct
  misc_feature 1..23: note = Description of Artificial Sequence: Synthetic primer
  source 1..23: mol_type = other DNA
tgtccactcaaatcttagcatca

SEQ ID NO: 52 - DNA, 24 bp, synthetic construct
  misc_feature 1..24: note = Description of Artificial Sequence: Synthetic primer
  source 1..24: mol_type = other DNA
tgaaatgtttttgtaggacgaaca

SEQ ID NO: 53 - DNA, 24 bp, synthetic construct
  misc_feature 1..24: note = Description of Artificial Sequence: Synthetic primer
  source 1..24: mol_type = other DNA
caacccaaataaaattgttcgtcc

SEQ ID NO: 54 - DNA, 27 bp, synthetic construct
  misc_feature 1..27: note = Description of Artificial Sequence: Synthetic primer
  source 1..27: mol_type = other DNA
ttgtgaaatgttgtaatgtaagaatcg

SEQ ID NO: 55 - DNA, 22 bp, synthetic construct
  misc_feature 1..22: note = Description of Artificial Sequence: Synthetic primer
  source 1..22: mol_type = other DNA
tgtcaacaacaaaaggttgagg

SEQ ID NO: 56 - DNA, 24 bp, synthetic construct
  misc_feature 1..24: note = Description of Artificial Sequence: Synthetic primer
  source 1..24: mol_type = other DNA
agtctaaaccgtaaagaaacatgg

SEQ ID NO: 57 - DNA, 26 bp, synthetic construct
  misc_feature 1..26: note = Description of Artificial Sequence: Synthetic primer
  source 1..26: mol_type = other DNA
aaaggttgaggaattaaaggaagtgg

SEQ ID NO: 58 - DNA, 26 bp, synthetic construct
  misc_feature 1..26: note = Description of Artificial Sequence: Synthetic primer
  source 1..26: mol_type = other DNA
tcaaaatgataagacaatcccaaacg

SEQ ID NO: 59 - DNA, 25 bp, synthetic construct
  misc_feature 1..25: note = Description of Artificial Sequence: Synthetic primer
  source 1..25: mol_type = other DNA
tgaaaaattcaaagacgaggatggg

SEQ ID NO: 60 - DNA, 20 bp, synthetic construct
  misc_feature 1..20: note = Description of Artificial Sequence: Synthetic primer
  source 1..20: mol_type = other DNA
aagggcctctctagggctcg

SEQ ID NO: 61 - DNA, 21 bp, synthetic construct
  misc_feature 1..21: note = Description of Artificial Sequence: Synthetic primer
  source 1..21: mol_type = other DNA
acacttaaccgagtttttggc

SEQ ID NO: 62 - DNA, 20 bp, synthetic construct
  misc_feature 1..20: note = Description of Artificial Sequence: Synthetic primer
  source 1..20: mol_type = other DNA
tgctgacttcacaaagctcc

SEQ ID NO: 63 - DNA, 23 bp, synthetic construct
  misc_feature 1..23: note = Description of Artificial Sequence: Synthetic primer
  source 1..23: mol_type = other DNA
tgcaagagataggattgtggaat

SEQ ID NO: 64 - DNA, 26 bp, synthetic construct
  misc_feature 1..26: note = Description of Artificial Sequence: Synthetic primer
  source 1..26: mol_type = other DNA
gcatgagttaggatctcaagttcttc

SEQ ID NO: 65 - DNA, 27 bp, synthetic construct
  misc_feature 1..27: note = Description of Artificial Sequence: Synthetic primer
  source 1..27: mol_type = other DNA
tgggatataaattgtgtggataaactg

SEQ ID NO: 66 - DNA, 26 bp, synthetic construct
  misc_feature 1..26: note = Description of Artificial Sequence: Synthetic primer
  source 1..26: mol_type = other DNA
gcacttgctcaaactcttcataacaa

SEQ ID NO: 67 - DNA, 23 bp, synthetic construct
  misc_feature 1..23: note = Description of Artificial Sequence: Synthetic primer
  source 1..23: mol_type = other DNA
tgtttgcatagaggactcatccc

SEQ ID NO: 68 - DNA, 23 bp, synthetic construct
  misc_feature 1..23: note = Description of Artificial Sequence: Synthetic primer
  source 1..23: mol_type = other DNA
agttttcattccaaccaaagagc

SEQ ID NO: 69 - DNA, 23 bp, synthetic construct
  misc_feature 1..23: note = Description of Artificial Sequence: Synthetic primer
  source 1..23: mol_type = other DNA
tttggatgaagctcgatgtttgc

SEQ ID NO: 70 - DNA, 27 bp, synthetic construct
  misc_feature 1..27: note = Description of Artificial Sequence: Synthetic primer
  source 1..27: mol_type = other DNA
agtaacagatgctctaataatctttcg

SEQ ID NO: 71 - DNA, 21 bp, synthetic construct
  misc_feature 1..21: note = Description of Artificial Sequence: Synthetic primer
  source 1..21: mol_type = other DNA
atgaggaacattcagcagtgg

SEQ ID NO: 72 - DNA, 24 bp, synthetic construct
  misc_feature 1..24: note = Description of Artificial Sequence: Synthetic primer
  source 1..24: mol_type = other DNA
agcacgaagtaatataggtgaagc

SEQ ID NO: 73 - DNA, 22 bp, synthetic construct
  misc_feature 1..22: note = Description of Artificial Sequence: Synthetic primer
  source 1..22: mol_type = other DNA
atggcgtttgtgaagaggaagc

SEQ ID NO: 74 - DNA, 24 bp, synthetic construct
  misc_feature 1..24: note = Description of Artificial Sequence: Synthetic primer
  source 1..24: mol_type = other DNA
aattggatgaataagcaaagcagc

SEQ ID NO: 75 - DNA, 28 bp, synthetic construct
  misc_feature 1..28: note = Description of Artificial Sequence: Synthetic primer
  source 1..28: mol_type = other DNA
tccttagttctacaaaattagcaagagc

SEQ ID NO: 76 - DNA, 24 bp, synthetic construct
  misc_feature 1..24: note = Description of Artificial Sequence: Synthetic primer
  source 1..24: mol_type = other DNA
gtaatcaaaagaccaaatgggagg

SEQ ID NO: 77 - DNA, 26 bp, synthetic construct
  misc_feature 1..26: note = Description of Artificial Sequence: Synthetic primer
  source 1..26: mol_type = other DNA
acaagtagattgaatgagctagaagc

SEQ ID NO: 78 - DNA, 24 bp, synthetic construct
  misc_feature 1..24: note = Description of Artificial Sequence: Synthetic primer
  source 1..24: mol_type = other DNA
tcataaccatgttgtcgtagaagc

SEQ ID NO: 79 - DNA, 22 bp, synthetic construct
  misc_feature 1..22: note = Description of Artificial Sequence: Synthetic primer
  source 1..22: mol_type = other DNA
gttcaaggcaagaaggagtagc

SEQ ID NO: 80 - DNA, 21 bp, synthetic construct
  misc_feature 1..21: note = Description of Artificial Sequence: Synthetic primer
  source 1..21: mol_type = other DNA
tttgctccatcgtcatcgtcg

SEQ ID NO: 81 - DNA, 20 bp, synthetic construct
  misc_feature 1..20: note = Description of Artificial Sequence: Synthetic primer
  source 1..20: mol_type = other DNA
attatgcagcgacgatgacg

SEQ ID NO: 82 - DNA, 26 bp, synthetic construct
  misc_feature 1..26: note = Description of Artificial Sequence: Synthetic primer
  source 1..26: mol_type = other DNA
ccttgcttctgatcttgttattctcc

SEQ ID NO: 83 - DNA, 24 bp, synthetic construct
  misc_feature 1..24: note = Description of Artificial Sequence: Synthetic primer
  source 1..24: mol_type = other DNA
tggagtgtttcttatggactgtgg

SEQ ID NO: 84 - DNA, 24 bp, synthetic construct
  misc_feature 1..24: note = Description of Artificial Sequence: Synthetic primer
  source 1..24: mol_type = other DNA
ctctcaacagcattagtgaaaagc

SEQ ID NO: 85 - DNA, 24 bp, synthetic construct
  misc_feature 1..24: note = Description of Artificial Sequence: Synthetic primer
  source 1..24: mol_type = other DNA
tgtgaaagcaatggatgatttacc

SEQ ID NO: 86 - DNA, 23 bp, synthetic construct
  misc_feature 1..23: note = Description of Artificial Sequence: Synthetic primer
  source 1..23: mol_type = other DNA
aattttggtctcctaacacatcg

SEQ ID NO: 87 - DNA, 21 bp, synthetic construct
  misc_feature 1..21: note = Description of Artificial Sequence: Synthetic primer
  source 1..21: mol_type = other DNA
ggcgaaatggtttcacagtgg

SEQ ID NO: 88 - DNA, 21 bp, synthetic construct
  misc_feature 1..21: note = Description of Artificial Sequence: Synthetic primer
  source 1..21: mol_type = other DNA
cgtagaatcatggatgcgtgg

SEQ ID NO: 89 - DNA, 30 bp, synthetic construct
  misc_feature 1..30: note = Description of Artificial Sequence: Synthetic primer
  source 1..30: mol_type = other DNA
aaataatgaagatgaaaatatggactctcc

SEQ ID NO: 90 - DNA, 26 bp, synthetic construct
  misc_feature 1..26: note = Description of Artificial Sequence: Synthetic primer
  source 1..26: mol_type = other DNA
gataaactatcctgagaagcatgtcc

SEQ ID NO: 91 - DNA, 23 bp, synthetic construct
  misc_feature 1..23: note = Description of Artificial Sequence: Synthetic primer
  source 1..23: mol_type = other DNA
aaactatcaaccttcactttggc

SEQ ID NO: 92 - DNA, 22 bp, synthetic construct
  misc_feature 1..22: note = Description of Artificial Sequence: Synthetic primer
  source 1..22: mol_type = other DNA
ttcctcttttgctctcttcacc

SEQ ID NO: 93 - DNA, 26 bp, synthetic construct
  misc_feature 1..26: note = Description of Artificial Sequence: Synthetic primer
  source 1..26: mol_type = other DNA
tgcaaagacttggaatctcttatcac

SEQ ID NO: 94 - DNA, 22 bp, synthetic construct
  misc_feature 1..22: note = Description of Artificial Sequence: Synthetic primer
  source 1..22: mol_type = other DNA
gagacaccggataaccatgttg

SEQ ID NO: 95 - DNA, 23 bp, synthetic construct
  misc_feature 1..23: note = Description of Artificial Sequence: Synthetic primer
  source 1..23: mol_type = other DNA
gaggcaattttatggtgtgtacc

SEQ ID NO: 96 - DNA, 26 bp, synthetic construct
  misc_feature 1..26: note = Description of Artificial Sequence: Synthetic primer
  source 1..26: mol_type = other DNA
tctttgttgtttctcttgtctcttcc

SEQ ID NO: 97 - DNA, 20 bp, synthetic construct
  misc_feature 1..20: note = Description of Artificial Sequence: Synthetic primer
  source 1..20: mol_type = other DNA
tgggaaagcactggtatggg

SEQ ID NO: 98 - DNA, 23 bp, synthetic construct
  misc_feature 1..23: note = Description of Artificial Sequence: Synthetic primer
  source 1..23: mol_type = other DNA
agctccaattcatctagtgtacc

SEQ ID NO: 99 - DNA, 21 bp, synthetic construct
  misc_feature 1..21: note = Description of Artificial Sequence: Synthetic primer
  source 1..21: mol_type = other DNA
gtgggaaagcactggtatggg

SEQ ID NO: 100 - DNA, 25 bp, synthetic construct
  misc_feature 1..25: note = Description of Artificial Sequence: Synthetic primer
  source 1..25: mol_type = other DNA
aatttttgtaatgtggctcaaatgc

SEQ ID NO: 101 - DNA, 24 bp, synthetic construct
  misc_feature 1..24: note = Description of Artificial Sequence: Synthetic primer
  source 1..24: mol_type = other DNA
tgggatattagtgctatggatggg

SEQ ID NO: 102 - DNA, 28 bp, synthetic construct
  misc_feature 1..28: note = Description of Artificial Sequence: Synthetic primer
  source 1..28: mol_type = other DNA
ttctgaaggaattttattatatggaggc

SEQ ID NO: 103 - DNA, 25 bp, synthetic construct
  misc_feature 1..25: note = Description of Artificial Sequence: Synthetic primer
  source 1..25: mol_type = other DNA
tagtgaatccaaacaaggaagatgc

SEQ ID NO: 104 - DNA, 25 bp, synthetic construct
  misc_feature 1..25: note = Description of Artificial Sequence: Synthetic primer
  source 1..25: mol_type = other DNA
tcatctgtaagacgtaaaatcatcg

SEQ ID NO: 105 - DNA, 23 bp, synthetic construct
  misc_feature 1..23: note = Description of Artificial Sequence: Synthetic primer
  source 1..23: mol_type = other DNA
gatggcgtgtttgaagaagaagc

SEQ ID NO: 106 - DNA, 26 bp, synthetic construct
  misc_feature 1..26: note = Description of Artificial Sequence: Synthetic primer
  source 1..26: mol_type = other DNA
tgatagtacatgatcttttgtttggc

SEQ ID NO: 107 - DNA, 26 bp, synthetic construct
  misc_feature 1..26: note = Description of Artificial Sequence: Synthetic primer
  source 1..26: mol_type = other DNA
ttctcgaagatcagcaaactatcaac

SEQ ID NO: 108 - DNA, 25 bp, synthetic construct
  misc_feature 1..25: note = Description of Artificial Sequence: Synthetic primer
  source 1..25: mol_type = other DNA
ttgaaaggggtagaaagtgattgta

SEQ ID NO: 109 - DNA, 25 bp, synthetic construct
  misc_feature 1..25: note = Description of Artificial Sequence: Synthetic primer
  source 1..25: mol_type = other DNA
aggtaagagtaatggtgaagagagc

SEQ ID NO: 110 - DNA, 25 bp, synthetic construct
  misc_feature 1..25: note = Description of Artificial Sequence: Synthetic primer
  source 1..25: mol_type = other DNA
cattctcaaagtggtaagagattcc

SEQ ID NO: 111 - DNA, 22 bp, synthetic construct
  misc_feature 1..22: note = Description of Artificial Sequence: Synthetic primer
  source 1..22: mol_type = other DNA
gagcaaaagaggaggagaagcc

SEQ ID NO: 112 - DNA, 26 bp, synthetic construct
  misc_feature 1..26: note = Description of Artificial Sequence: Synthetic primer
  source 1..26: mol_type = other DNA
ggcatagacatttttgttggtgttgc

SEQ ID NO: 113 - DNA, 23 bp, synthetic construct
  misc_feature 1..23: note = Description of Artificial Sequence: Synthetic primer
  source 1..23: mol_type = other DNA
gaggcaattttatggtgtcttcc

SEQ ID NO: 114 - DNA, 22 bp, synthetic construct
  misc_feature 1..22: note = Description of Artificial Sequence: Synthetic primer
  source 1..22: mol_type = other DNA
tgttgtgtgtcttgtctcttcc

SEQ ID NO: 115 - DNA, 20 bp, synthetic construct
  misc_feature 1..20: note = Description of Artificial Sequence: Synthetic primer
  source 1..20: mol_type = other DNA
tgggaaagcactgatatggg

SEQ ID NO: 116 - DNA, 23 bp, synthetic construct
  misc_feature 1..23: note = Description of Artificial Sequence: Synthetic primer
  source 1..23: mol_type = other DNA
agctccaattcatctagtgtacc

SEQ ID NO: 117 - DNA, 24 bp, synthetic construct
  misc_feature 1..24: note = Description of Artificial Sequence: Synthetic primer
  source 1..24: mol_type = other DNA
tgggatattagtgctatggatggg

SEQ ID NO: 118 - DNA, 28 bp, synthetic construct
  misc_feature 1..28: note = Description of Artificial Sequence: Synthetic primer
  source 1..28: mol_type = other DNA
ttctgaaggaattttattatatggaggc

SEQ ID NO: 119 - DNA, 26 bp, synthetic construct
  misc_feature 1..26: note = Description of Artificial Sequence: Synthetic primer
  source 1..26: mol_type = other DNA
agctttgaagagtacattgagaatgc

SEQ ID NO: 120 - DNA, 26 bp, synthetic construct
  misc_feature 1..26: note = Description of Artificial Sequence: Synthetic primer
  source 1..26: mol_type = other DNA
atcatctgtaagtcgtaaaatcatcg

SEQ ID NO: 121 - DNA, 22 bp, synthetic construct
  misc_feature 1..22: note = Description of Artificial Sequence: Synthetic primer
  source 1..22: mol_type = other DNA
ggcgatgttcccaaatcaatcc

SEQ ID NO: 122 - DNA, 23 bp, synthetic construct
  misc_feature 1..23: note = Description of Artificial Sequence: Synthetic primer
  source 1..23: mol_type = other DNA
aacattggagagtagtcatcacc

SEQ ID NO: 123 - DNA, 26 bp, synthetic construct
  misc_feature 1..26: note = Description of Artificial Sequence: Synthetic primer
  source 1..26: mol_type = other DNA
gatgatgatggtgatgactactctcc

SEQ ID NO: 124 - DNA, 26 bp, synthetic construct
  misc_feature 1..26: note = Description of Artificial Sequence: Synthetic primer
  source 1..26: mol_type = other DNA
gatagtacatgatcttttgtatggcg

SEQ ID NO: 125 - DNA, 22 bp, synthetic construct
  misc_feature 1..22: note = Description of Artificial Sequence: Synthetic primer
  source 1..22: mol_type = other DNA
gatcagcaaactatcaaccccc

SEQ ID NO: 126 - DNA, 23 bp, synthetic construct
  misc_feature 1..23: note = Description of Artificial Sequence: Synthetic primer
  source 1..23: mol_type = other DNA
tcaccatcactcttacttcttcc

SEQ ID NO: 127 - DNA, 26 bp, synthetic construct
  misc_feature 1..26: note = Description of Artificial Sequence: Synthetic primer
  source 1..26: mol_type = other DNA
acttggaatctcttatcactttgagg

SEQ ID NO: 128 - DNA, 28 bp, synthetic construct
  misc_feature 1..28: note = Description of Artificial Sequence: Synthetic primer
  source 1..28: mol_type = other DNA
agagaattggcatacacattattattgg

SEQ ID NO: 129 - DNA, 23 bp, synthetic construct
  misc_feature 1..23: note = Description of Artificial Sequence: Synthetic primer
  source 1..23: mol_type = other DNA
gaggcaattttatggtgtgtacc

SEQ ID NO: 130 - DNA, 25 bp, synthetic construct
  misc_feature 1..25: note = Description of Artificial Sequence: Synthetic primer
  source 1..25: mol_type = other DNA
tttctcttgtctcttccaaaatacc

SEQ ID NO: 131 - DNA, 22 bp, synthetic construct
  misc_feature 1..22: note = Description of Artificial Sequence: Synthetic primer
  source 1..22: mol_type = other DNA
tggtgggaaagcactgatatgg

SEQ ID NO: 132 - DNA, 22 bp, synthetic construct
  misc_feature 1..22: note = Description of Artificial Sequence: Synthetic primer
  source 1..22: mol_type = other DNA
aatgtggctcaaatgcaactcc

SEQ ID NO: 133 - DNA, 20 bp, synthetic construct
  misc_feature 1..20: note = Description of Artificial Sequence: Synthetic primer
  source 1..20: mol_type = other DNA
tgggaaagcactgatatggg

SEQ ID NO: 134 - DNA, 23 bp, synthetic construct
  misc_feature 1..23: note = Description of Artificial Sequence: Synthetic primer
  source 1..23: mol_type = other DNA
agctccaattcatctagtgtacc

SEQ ID NO: 135 - DNA, 24 bp, synthetic construct
  misc_feature 1..24: note = Description of Artificial Sequence: Synthetic primer
  source 1..24: mol_type = other DNA
tgggatattagtgctatggatggg

SEQ ID NO: 136 - DNA, 28 bp, synthetic construct
  misc_feature 1..28: note = Description of Artificial Sequence: Synthetic primer
  source 1..28: mol_type = other DNA
ttctgaaggaattttattatatggaggc

SEQ ID NO: 137 - DNA, 25 bp, synthetic construct
  misc_feature 1..25: note = Description of Artificial Sequence: Synthetic primer
  source 1..25: mol_type = other DNA
gctttgaagagtacattgagaatgc

SEQ ID NO: 138 - DNA, 25 bp, synthetic construct
  misc_feature 1..25: note = Description of Artificial Sequence: Synthetic primer
  source 1..25: mol_type = other DNA
cgatgaatgtcgtattatggtaggg

SEQ ID NO: 139 - DNA, 24 bp, synthetic construct
  misc_feature 1..24: note = Description of Artificial Sequence: Synthetic primer
  source 1..24: mol_type = other DNA
gtgaatccaaacaaggaaaatgcc

SEQ ID NO: 140 - DNA, 27 bp, synthetic construct
  misc_feature 1..27: note = Description of Artificial Sequence: Synthetic primer
  source 1..27: mol_type = other DNA
tgaagttcccatatcatctttaagtcg

SEQ ID NO: 141 - DNA, 24 bp, synthetic construct
  misc_feature 1..24: note = Description of Artificial Sequence: Synthetic primer
  source 1..24: mol_type = other DNA
tgaattgaaaagaggcgatgttcc

SEQ ID NO: 142 - DNA, 22 bp, synthetic construct
  misc_feature 1..22: note = Description of Artificial Sequence: Synthetic primer
  source 1..22: mol_type = other DNA
acattggagagtagtcatcacc

SEQ ID NO: 143 - DNA, 24 bp, synthetic construct
  misc_feature 1..24: note = Description of Artificial Sequence: Synthetic primer
  source 1..24: mol_type = other DNA
tggtatatctgaagaggaagctcg

SEQ ID NO: 144 - DNA, 25 bp, synthetic construct
  misc_feature 1..25: note = Description of Artificial Sequence: Synthetic primer
  source 1..25: mol_type = other DNA
agaacattggagagtagtcatcacc

SEQ ID NO: 145 - DNA, 22 bp, synthetic construct
  misc_feature 1..22: note = Description of Artificial Sequence: Synthetic primer
  source 1..22: mol_type = other DNA
gcatagcttttcaccaatttgc

SEQ ID NO: 146 - DNA, 21 bp, synthetic construct
  misc_feature 1..21: note = Description of Artificial Sequence: Synthetic primer
  source 1..21: mol_type = other DNA
gggagggatgatgatgaagca

SEQ ID NO: 147 - DNA, 23 bp, synthetic construct
  misc_feature 1..23: note = Description of Artificial Sequence: Synthetic primer
  source 1..23: mol_type = other DNA
caatgtactgtggtcgataaccc

SEQ ID NO: 148 - DNA, 25 bp, synthetic construct
  misc_feature 1..25: note = Description of Artificial Sequence: Synthetic primer
  source 1..25: mol_type = other DNA
gaacaaaatcaaaagaccaaatggg

SEQ ID NO: 149 - DNA, 24 bp, synthetic construct
  misc_feature 1..24: note = Description of Artificial Sequence: Synthetic primer
  source 1..24: mol_type = other DNA
tggagaaagatgtgaaaaggatgc

SEQ ID NO: 150 - DNA, 23 bp, synthetic construct
  misc_feature 1..23: note = Description of Artificial Sequence: Synthetic primer
  source 1..23: mol_type = other DNA
attggcgtagaagcctaaattgg

SEQ ID NO: 151 - DNA, 23 bp, synthetic construct
  misc_feature 1..23: note = Description of Artificial Sequence: Synthetic primer
  source 1..23: mol_type = other DNA
tcacaagacaggagagttcaagg

SEQ ID NO: 152 - DNA, 20 bp, synthetic construct
  misc_feature 1..20: note = Description of Artificial Sequence: Synthetic primer
  source 1..20: mol_type = other DNA
tgaagtggcatctccaaagc

SEQ ID NO: 153 - DNA, 23 bp, synthetic construct
  misc_feature 1..23: note = Description of Artificial Sequence: Synthetic primer
  source 1..23: mol_type = other DNA
tggtggaaggattctaaacttgg

SEQ ID NO: 154 - DNA, 25 bp, synthetic construct
  misc_feature 1..25: note = Description of Artificial Sequence: Synthetic primer
  source 1..25: mol_type = other DNA
ctccaatgttccataaatgtcatgc

SEQ ID NO: 155 - DNA, 23 bp, synthetic construct
  misc_feature 1..23: note = Description of Artificial Sequence: Synthetic primer
  source 1..23: mol_type = other DNA
gcaagttggagtaagatttgagc

SEQ ID NO: 156 - DNA, 25 bp, synthetic construct
  misc_feature 1..25: note = Description of Artificial Sequence: Synthetic primer
  source 1..25: mol_type = other DNA
attagtgaaaagttgtagttcctcc

SEQ ID NO: 157 - DNA, 25 bp, synthetic construct
  misc_feature 1..25: note = Description of Artificial Sequence: Synthetic primer
  source 1..25: mol_type = other DNA
aagaggcaaaatggttttatagtgg

SEQ ID NO: 158 - DNA, 24 bp, synthetic construct
  misc_feature 1..24: note = Description of Artificial Sequence: Synthetic primer
  source 1..24: mol_type = other DNA
ttggtaacaggatttgtaaaagcg

SEQ ID NO: 159 - DNA, 20 bp, synthetic construct
  misc_feature 1..20: note = Description of Artificial Sequence: Synthetic primer
  source 1..20: mol_type = other DNA
ggatggttgtctgtgggagg

SEQ ID NO: 160 - DNA, 21 bp, synthetic construct
  misc_feature 1..21: note = Description of Artificial Sequence: Synthetic primer
  source 1..21: mol_type = other DNA
tgcatggcgaactatgttagg

SEQ ID NO: 161 - DNA, 21 bp, synthetic construct
  misc_feature 1..21: note = Description of Artificial Sequence: Synthetic primer
  source 1..21: mol_type = other DNA
tgcaaaaatcttggtagagcg

SEQ ID NO: 162 - DNA, 25 bp, synthetic construct
  misc_feature 1..25: note = Description of Artificial Sequence: Synthetic primer
  source 1..25: mol_type = other DNA
tggggataggagtaataatcaaccc

SEQ ID NO: 163 - DNA, 29 bp, synthetic construct
  misc_feature 1..29: note = Description of Artificial Sequence: Synthetic primer
  source 1..29: mol_type = other DNA
atattcaagtcttagcttcatctcaatta

SEQ ID NO: 164 - DNA, 21 bp, synthetic construct
  misc_feature 1..21: note = Description of Artificial Sequence: Synthetic primer
  source 1..21: mol_type = other DNA
atcgccccaaatagaagggtg

SEQ ID NO: 165 - DNA, 28 bp, synthetic construct
  misc_feature 1..28: note = Description of Artificial Sequence: Synthetic primer
  source 1..28: mol_type = other DNA
tttgagagtgaaattgagaaattgttgg

SEQ ID NO: 166 - DNA, 30 bp, synthetic construct
  misc_feature 1..30: note = Description of Artificial Sequence: Synthetic primer
  source 1..30: mol_type = other DNA
taaatccatgttgtcttaataatctaaacc

SEQ ID NO: 167 - DNA, 23 bp, synthetic construct
  misc_feature 1..23: note = Description of Artificial Sequence: Synthetic primer
  source 1..23: mol_type = other DNA
ggtttgcttagcttgtatgaggc

SEQ ID NO: 168 - DNA, 25 bp, synthetic construct
  misc_feature 1..25: note = Description of Artificial Sequence: Synthetic primer
  source 1..25: mol_type = other DNA
gcctctctatggtctttcttagagg

SEQ ID NO: 169 - DNA, 23 bp, synthetic construct
  misc_feature 1..23: note = Description of Artificial Sequence: Synthetic primer
  source 1..23: mol_type = other DNA
tggtggaaagagcatgagtttgc

SEQ ID NO: 170 - DNA, 25 bp, synthetic construct
  misc_feature 1..25: note = Description of Artificial Sequence: Synthetic primer
  source 1..25: mol_type = other DNA
attgaggctaatgcaatgactttgg

SEQ ID NO: 171 - DNA, 21 bp, synthetic construct
  misc_feature 1..21: note = Description of Artificial Sequence: Synthetic primer
  source 1..21: mol_type = other DNA
agctcgatggttgagtgaagg

SEQ ID NO: 172 - DNA, 20 bp, synthetic construct
  misc_feature 1..20: note = Description of Artificial Sequence: Synthetic primer
  source 1..20: mol_type = other DNA
ctagcaaggagagtggaagc

SEQ ID NO: 173 - DNA, 24 bp, synthetic construct
  misc_feature 1..24: note = Description of Artificial Sequence: Synthetic primer
  source 1..24: mol_type = other DNA
tgagcaaaagagaaatcacatacc

SEQ ID NO: 174 - DNA, 20 bp, synthetic construct
  misc_feature 1..20: note = Description of Artificial Sequence: Synthetic primer
  source 1..20: mol_type = other DNA
tttctttccagtgggtgtcc

SEQ ID NO: 175 - DNA, 24 bp, synthetic construct
  misc_feature 1..24: note = Description of Artificial Sequence: Synthetic primer
  source 1..24: mol_type = other DNA
tgaaacaatatggggtatcagagg

SEQ ID NO: 176 - DNA, 24 bp, synthetic construct
  misc_feature 1..24: note = Description of Artificial Sequence: Synthetic primer
  source 1..24: mol_type = other DNA
aatgctttctttgagcacttttcc

SEQ ID NO: 177 - DNA, 20 bp, synthetic construct
  misc_feature 1..20: note = Description of Artificial Sequence: Synthetic primer
  source 1..20: mol_type = other DNA
gcattgtatggctgttcacc

SEQ ID NO: 178 - DNA, 20 bp, synthetic construct
  misc_feature 1..20: note = Description of Artificial Sequence: Synthetic primer
  source 1..20: mol_type = other DNA
tcgaaagaccaaatcggagg

SEQ ID NO: 179 - DNA, 25 bp, synthetic construct
  misc_feature 1..25: note = Description of Artificial Sequence: Synthetic primer
  source 1..25: mol_type = other DNA
tcacaccaaaaacatctattagtcc

SEQ ID NO: 180 - DNA, 23 bp, synthetic construct
  misc_feature 1..23: note = Description of Artificial Sequence: Synthetic primer
  source 1..23: mol_type = other DNA
caaatcggaggttcataattggc

SEQ ID NO: 181 - DNA, 25 bp, synthetic construct
  misc_feature 1..25: note = Description of Artificial Sequence: Synthetic primer
  source 1..25: mol_type = other DNA
aagaaagaagtgacaagaatgctcc

SEQ ID NO: 182 - DNA, 20 bp, synthetic construct
  misc_feature 1..20: note = Description of Artificial Sequence: Synthetic primer
  source 1..20: mol_type = other DNA
actgtatagccatgttggcg

SEQ ID NO: 183 - DNA, 25 bp, synthetic construct
  misc_feature 1..25: note = Description of Artificial Sequence: Synthetic primer
  source 1..25: mol_type = other DNA
gaaattaactctttagccctactcg

SEQ ID NO: 184 - DNA, 22 bp, synthetic construct
  misc_feature 1..22: note = Description of Artificial Sequence: Synthetic primer
  source 1..22: mol_type = other DNA
agcctaaattcgagagcaatgg

SEQ ID NO: 185 - DNA, 22 bp, synthetic construct
  misc_feature 1..22: note = Description of Artificial Sequence: Synthetic primer
  source 1..22: mol_type = other DNA
tgctttcaaggataagagaggg

SEQ ID NO: 186 - DNA, 24 bp, synthetic construct
  misc_feature 1..24: note = Description of Artificial Sequence: Synthetic primer
  source 1..24: mol_type = other DNA
tcttcctcattctccattttctcc

SEQ ID NO: 187 - DNA, 23 bp, synthetic construct
  misc_feature 1..23: note = Description of Artificial Sequence: Synthetic primer
  source 1..23: mol_type = other DNA
catggagaaaatggagaatgagg

SEQ ID NO: 188 - DNA, 21 bp, synthetic construct
  misc_feature 1..21: note = Description of Artificial Sequence: Synthetic primer
  source 1..21: mol_type = other DNA
tcgcaaactcgaacaaagtcg

SEQ ID NO: 189 - DNA, 25 bp, synthetic construct
  misc_feature 1..25: note = Description of Artificial Sequence: Synthetic primer
  source 1..25: mol_type = other DNA
ttgctagagatagattgatggaagc

SEQ ID NO: 190 - DNA, 25 bp, synthetic construct
  misc_feature 1..25: note = Description of Artificial Sequence: Synthetic primer
  source 1..25: mol_type = other DNA
aaagctctaattcctccaaagttcc

SEQ ID NO: 191 - DNA, 23 bp, synthetic construct
  misc_feature 1..23: note = Description of Artificial Sequence: Synthetic primer
  source 1..23: mol_type = other DNA
accagattacatgaagatgcctt

SEQ ID NO: 192 - DNA, 23 bp, synthetic construct
  misc_feature 1..23: note = Description of Artificial Sequence: Synthetic primer
  source 1..23: mol_type = other DNA
ctaatacatcgaaccccatctca

SEQ ID NO: 193 - DNA, 25 bp, synthetic construct
  misc_feature 1..25: note = Description of Artificial Sequence: Synthetic primer
  source 1..25: mol_type = other DNA
ggtattatagtggataccaaccaac

SEQ ID NO: 194 - DNA, 20 bp, synthetic construct
  misc_feature 1..20: note = Description of Artificial Sequence: Synthetic primer
  source 1..20: mol_type = other DNA
aagccaacccaactcagtgt

SEQ ID NO: 195 - DNA, 21 bp, synthetic construct
  misc_feature 1..21: note = Description of Artificial Sequence: Synthetic primer
  source 1..21: mol_type = other DNA
acactgagttgggttggcttt

SEQ ID NO: 196 - DNA, 23 bp, synthetic construct
  misc_feature 1..23: note = Description of Artificial Sequence: Synthetic primer
  source 1..23: mol_type = other DNA
gttcctaaatcatctgcaagcct

SEQ ID NO: 197 - DNA, 20 bp, synthetic construct
  misc_feature 1..20: note = Description of Artificial Sequence: Synthetic primer
  source 1..20: mol_type = other DNA
ttgaatagaggcgacgttcc

SEQ ID NO: 198 - DNA, 23 bp, synthetic construct
  misc_feature 1..23: note = Description of Artificial Sequence: Synthetic primer
  source 1..23: mol_type = other DNA
tgctgttctagccatatttttgc

SEQ ID NO: 199 - DNA, 25 bp, synthetic construct
  misc_feature 1..25: note = Description of Artificial Sequence: Synthetic primer
  source 1..25: mol_type = other DNA
tctagtcaagtgttagcttcatctc

SEQ ID NO: 200 - DNA, 22 bp, synthetic construct
  misc_feature 1..22: note = Description of Artificial Sequence: Synthetic primer
  source 1..22: mol_type = other DNA
tttgttgttggtcgaatgatgt

SEQ ID NO: 201 - DNA, 25 bp, synthetic construct
  misc_feature 1..25: note = Description of Artificial Sequence: Synthetic primer
  source 1..25: mol_type = other DNA
agggacaagttgaagaattgaaaga

SEQ ID NO: 202 - DNA, 23 bp, synthetic construct
  misc_feature 1..23: note = Description of Artificial Sequence: Synthetic primer
  source 1..23: mol_type = other DNA
catggttggagtagtagtagtgt

SEQ ID NO: 203 - DNA, 24 bp, synthetic construct
  misc_feature 1..24: note = Description of Artificial Sequence: Synthetic primer
  source 1..24: mol_type = other DNA
gagagtggtaagtttaaggaaagc

SEQ ID NO: 204 - DNA, 22 bp, synthetic construct
  misc_feature 1..22: note = Description of Artificial Sequence: Synthetic primer
  source 1..22: mol_type = other DNA
cctagcataaagcctcactagg

SEQ ID NO: 205 - DNA, 22 bp, synthetic construct
  misc_feature 1..22: note = Description of Artificial Sequence: Synthetic primer
  source 1..22: mol_type = other DNA
ggctcttgctttcactaccacc

SEQ ID NO: 206 - DNA, 24 bp, synthetic construct
  misc_feature 1..24: note = Description of Artificial Sequence: Synthetic primer
  source 1..24: mol_type = other DNA
cctcactagggtttttctcaaagg

SEQ ID NO: 207 - DNA, 22 bp, synthetic construct
  misc_feature 1..22: note = Description of Artificial Sequence: Synthetic primer
  source 1..22: mol_type = other DNA
ggtggaaagaattagacttggc

SEQ ID NO: 208 - DNA, 20 bp, synthetic construct
  misc_feature 1..20: note = Description of Artificial Sequence: Synthetic primer
  source 1..20: mol_type = other DNA
atgtcccacctgagaattgc

SEQ ID NO: 209 - DNA, 29 bp, synthetic construct
  misc_feature 1..29: note = Description of Artificial Sequence: Synthetic primer
  source 1..29: mol_type = other DNA
acttagtccagattatttgaagacatatt

SEQ ID NO: 210 - DNA, 25 bp, synthetic construct
  misc_feature 1..25: note = Description of Artificial Sequence: Synthetic primer
  source 1..25: mol_type = other DNA
tgcatagtgaagtttgtatctctct

SEQ ID NO: 211 - DNA, 24 bp, synthetic construct
  misc_feature 1..24: note = Description of Artificial Sequence: Synthetic primer
  source 1..24: mol_type = other DNA
ttgagacctcttttgttggaatgc

SEQ ID NO: 212 - DNA, 24 bp, synthetic construct
  misc_feature 1..24: note = Description of Artificial Sequence: Synthetic primer
  source 1..24: mol_type = other DNA
aaaatctttggttgtgtagagagc

SEQ ID NO: 213 - DNA, 21 bp, synthetic construct
  misc_feature 1..21: note = Description of Artificial Sequence: Synthetic primer
  source 1..21: mol_type = other DNA
atggtgtatcggaacaagagg

SEQ ID NO: 214 - DNA, 18 bp, synthetic construct
  misc_feature 1..18: note = Description of Artificial Sequence: Synthetic primer
  source 1..18: mol_type = other DNA
aacgcagcaacactgtcc

SEQ ID NO: 215 - DNA, 28 bp, synthetic construct
  misc_feature 1..28: note = Description of Artificial Sequence: Synthetic primer
  source 1..28: mol_type = other DNA
aagtgcttgacattatctacaaagaagg

SEQ ID NO: 216 - DNA, 27 bp, synthetic construct
  misc_feature 1..27: note = Description of Artificial Sequence: Synthetic primer
  source 1..27: mol_type = other DNA
taatgggatgggatctataagcaacgc

SEQ ID NO: 217 - DNA, 23 bp, synthetic construct
  misc_feature 1..23: note = Description of Artificial Sequence: Synthetic primer
  source 1..23: mol_type = other DNA
atggcttttcaccaatttgctcc

SEQ ID NO: 218 - DNA, 23 bp, synthetic construct
  misc_feature 1..23: note = Description of Artificial Sequence: Synthetic primer
  source 1..23: mol_type = other DNA
tcgtagaactagggttatcgacc

SEQ ID NO: 219 - DNA, 23 bp, synthetic construct
  misc_feature 1..23: note = Description of Artificial Sequence: Synthetic primer
  source 1..23: mol_type = other DNA
tttgctccatcatcatccctccc

SEQ ID NO: 220 - DNA, 25 bp, synthetic construct
  misc_feature 1..25: note = Description of Artificial Sequence: Synthetic primer
  source 1..25: mol_type = other DNA
gaggtccatagttggctgatcttcg

SEQ ID NO: 221 - DNA, 25 bp, synthetic construct
  misc_feature 1..25: note = Description of Artificial Sequence: Synthetic primer
  source 1..25: mol_type = other DNA
ttgaagaaagaagtgacaagaatgg

SEQ ID NO: 222 - DNA, 23 bp, synthetic construct
  misc_feature 1..23: note = Description of Artificial Sequence: Synthetic primer
  source 1..23: mol_type = other DNA
ggtaagatattccaagcctttgc

SEQ ID NO: 223 - DNA, 25 bp, synthetic construct
  misc_feature 1..25: note = Description of Artificial Sequence: Synthetic primer
  source 1..25: mol_type = other DNA
tacatggagaaaatggagaatgagg

SEQ ID NO: 224 - DNA, 20 bp, synthetic construct
  misc_feature 1..20: note = Description of Artificial Sequence: Synthetic primer
  source 1..20: mol_type = other DNA
tgaagcggaagctcgaaagc

SEQ ID NO: 225 - DNA, 20 bp, synthetic construct
  misc_feature 1..20: note = Description of Artificial Sequence: Synthetic primer
  source 1..20: mol_type = other DNA
atcacgctttcgagcttccg

SEQ ID NO: 226 - DNA, 24 bp, synthetic construct
  misc_feature 1..24: note = Description of Artificial Sequence: Synthetic primer
  source 1..24: mol_type = other DNA
aaatcttcttggtgtgttgattgc

SEQ ID NO: 227 - DNA, 25 bp, synthetic construct
  misc_feature 1..25: note = Description of Artificial Sequence: Synthetic primer
  source 1..25: mol_type = other DNA
ttgctagagatagattgatggaagc

SEQ ID NO: 228 - DNA, 25 bp, synthetic construct
  misc_feature 1..25: note = Description of Artificial Sequence: Synthetic primer
  source 1..25: mol_type = other DNA
aaagctctaattcctccaaagttcc

SEQ ID NO: 229 - DNA, 24 bp, synthetic construct
  misc_feature 1..24: note = Description of Artificial Sequence: Synthetic primer
  source 1..24: mol_type = other DNA
gttaccagattacatgaagatgcc

SEQ ID NO: 230 - DNA, 23 bp, synthetic construct
  misc_feature 1..23: note = Description of Artificial Sequence: Synthetic primer
  source 1..23: mol_type = other DNA
actaatacatcgaaccccatctc

SEQ ID NO: 231 - DNA, 22 bp, synthetic construct
  misc_feature 1..22: note = Description of Artificial Sequence: Synthetic primer
  source 1..22: mol_type = other DNA
agttgggttggctttcaatagg

SEQ ID NO: 232 - DNA, 23 bp, synthetic construct
  misc_feature 1..23: note = Description of Artificial Sequence: Synthetic primer
  source 1..23: mol_type = other DNA
atgttcctaaatcatctgcaagc

SEQ ID NO: 233 - DNA, 22 bp, synthetic construct
  misc_feature 1..22: note = Description of Artificial Sequence: Synthetic primer
  source 1..22: mol_type = other DNA
tagaggcgacgttcctaaatcg

SEQ ID NO: 234 - DNA, 23 bp, synthetic construct
  misc_feature 1..23: note = Description of Artificial Sequence: Synthetic primer
  source 1..23: mol_type = other DNA
tgctgttctagccatatttttgc

SEQ ID NO: 235 - DNA, 25 bp, synthetic construct
  misc_feature 1..25: note = Description of Artificial Sequence: Synthetic primer
  source 1..25: mol_type = other DNA
tctagtcaagtgttagcttcatctc

SEQ ID NO: 236 - DNA, 24 bp, synthetic construct
  misc_feature 1..24: note = Description of Artificial Sequence: Synthetic primer
  source 1..24: mol_type = other DNA
tgttgttggtcgaatgatgttttg

SEQ ID NO: 237 - DNA, 27 bp, synthetic construct
  misc_feature 1..27: note = Description of Artificial Sequence: Synthetic primer
  source 1..27: mol_type = other DNA
aagaagttgttaggaaagagatattcc

SEQ ID NO: 238 - DNA, 27 bp, synthetic construct
  misc_feature 1..27: note = Description of Artificial Sequence: Synthetic primer
  source 1..27: mol_type = other DNA
agatgaaatgttaaatccatgttgtcg

SEQ ID NO: 239 - DNA, 25 bp, synthetic construct
  misc_feature 1..25: note = Description of Artificial Sequence: Synthetic primer
  source 1..25: mol_type = other DNA
tgagagtggtaagtttaaggaaagc

SEQ ID NO: 240 - DNA, 21 bp, synthetic construct
  misc_feature 1..21: note = Description of Artificial Sequence: Synthetic primer
  source 1..21: mol_type = other DNA
ggtggtagtgaaagcaagagc

SEQ ID NO: 241 - DNA, 22 bp, synthetic construct
  misc_feature 1..22: note = Description of Artificial Sequence: Synthetic primer
  source 1..22: mol_type = other DNA
ggctcttgctttcactaccacc

SEQ ID NO: 242 - DNA, 24 bp, synthetic construct
  misc_feature 1..24: note = Description of Artificial Sequence: Synthetic primer
  source 1..24: mol_type = other DNA
cctcactagggtttttctcaaagg

SEQ ID NO: 243 - DNA, 21 bp, synthetic construct
  misc_feature 1..21: note = Description of Artificial Sequence: Synthetic primer
  source 1..21: mol_type = other DNA
tgagaaaaaccctagtgaggc

SEQ ID NO: 244 - DNA, 27 bp, synthetic construct
  misc_feature 1..27: note = Description of Artificial Sequence: Synthetic primer
  source 1..27: mol_type = other DNA
ttgtagtagattgaagtccaactttgc

SEQ ID NO: 245 - DNA, 23 bp, synthetic construct
  misc_feature 1..23: note = Description of Artificial Sequence: Synthetic primer
  source 1..23: mol_type = other DNA
ttagacttggcaaacaaactacc

SEQ ID NO: 246 - DNA, 21 bp, synthetic construct
  misc_feature 1..21: note = Description of Artificial Sequence: Synthetic primer
  source 1..21: mol_type = other DNA
tatgtcccacctgagaattgc

SEQ ID NO: 247 - DNA, 30 bp, synthetic construct
  misc_feature 1..30: note = Description of Artificial Sequence: Synthetic primer
  source 1..30: mol_type = other DNA
acttagtccagattatttgaagacatatta

SEQ ID NO: 248 - DNA, 26 bp, synthetic construct
  misc_feature 1..26: note = Description of Artificial Sequence: Synthetic primer
  source 1..26: mol_type = other DNA
ttgcatagtgaagtttgtatctctct

SEQ ID NO: 249 - DNA, 22 bp, synthetic construct
  misc_feature 1..22: note = Description of Artificial Sequence: Synthetic primer
  source 1..22: mol_type = other DNA
ttccatgaagcacaatggttga

SEQ ID NO: 250 - DNA, 23 bp, synthetic construct
  misc_feature 1..23: note = Description of Artificial Sequence: Synthetic primer
  source 1..23: mol_type = other DNA
gcattccaacaaaagaggtctca

SEQ ID NO: 251 - DNA, 24 bp, synthetic construct
  misc_feature 1..24: note = Description of Artificial Sequence: Synthetic primer
  source 1..24: mol_type = other DNA
ggttacccaatgttgattgagacc

SEQ ID NO: 252 - DNA, 25 bp, synthetic construct
  misc_feature 1..25: note = Description of Artificial Sequence: Synthetic primer
  source 1..25: mol_type = other DNA
ggttgtgtagagagccattcaaata

SEQ ID NO: 253 - DNA, 21 bp, synthetic construct
  misc_feature 1..21: note = Description of Artificial Sequence: Synthetic primer
  source 1..21: mol_type = other DNA
tggtgtatcggaacaagaggc

SEQ ID NO: 254 - DNA, 19 bp, synthetic construct
  misc_feature 1..19: note = Description of Artificial Sequence: Synthetic primer
  source 1..19: mol_type = other DNA
caacgcagcaacactgtcc

SEQ ID NO: 255 - DNA, 20 bp, synthetic construct
  misc_feature 1..20: note = Description of Artificial Sequence: Synthetic primer
  source 1..20: mol_type = other DNA
acgcatcttttcgtcccttt

SEQ ID NO: 256 - DNA, 23 bp, synthetic construct
  misc_feature 1..23: note = Description of Artificial Sequence: Synthetic primer
  source 1..23: mol_type = other DNA
tgagatcaccgttactcctgata

SEQ ID NO: 257 - DNA, 21 bp, synthetic construct
  misc_feature 1..21: note = Description of Artificial Sequence: Synthetic primer
  source 1..21: mol_type = other DNA
agcagacccatttgatgaagg

SEQ ID NO: 258 - DNA, 20 bp, synthetic construct
  misc_feature 1..20: note = Description of Artificial Sequence: Synthetic primer
  source 1..20: mol_type = other DNA
cagcaggaacgaagagaccg

SEQ ID NO: 259 - DNA, 21 bp, synthetic construct
  misc_feature 1..21: note = Description of Artificial Sequence: Synthetic primer
  source 1..21: mol_type = other DNA
tcgacacaaggctaagagagg

SEQ ID NO: 260 - DNA, 20 bp, synthetic construct
  misc_feature 1..20: note = Description of Artificial Sequence: Synthetic primer
  source 1..20: mol_type = other DNA
gtccttggctgtgaacttgg

SEQ ID NO: 261 - DNA, 20 bp, synthetic construct
  misc_feature 1..20: note = Description of Artificial Sequence: Synthetic primer
  source 1..20: mol_type = other DNA
caagttcacagccaaggacc

SEQ ID NO: 262 - DNA, 25 bp, synthetic construct
  misc_feature 1..25: note = Description of Artificial Sequence: Synthetic primer
  source 1..25: mol_type = other DNA
ttatcaatttccattctatgcaggg

SEQ ID NO: 263 - DNA, 22 bp, synthetic construct
  misc_feature 1..22: note = Description of Artificial Sequence: Synthetic primer
  source 1..22: mol_type = other DNA
ggtggcgagacattggtttagc

SEQ ID NO: 264 - DNA, 22 bp, synthetic construct
  misc_feature 1..22: note = Description of Artificial Sequence: Synthetic primer
  source 1..22: mol_type = other DNA
atggattttgtaagcgcaaccc

SEQ ID NO: 265 - DNA, 25 bp, synthetic construct
  misc_feature 1..25: note = Description of Artificial Sequence: Synthetic primer
  source 1..25: mol_type = other DNA
tgctatacaaaaacttccagactcc

SEQ ID NO: 266 - DNA, 20 bp, synthetic construct
  misc_feature 1..20: note = Description of Artificial Sequence: Synthetic primer
  source 1..20: mol_type = other DNA
tgtaaagggctccatccacg

SEQ ID NO: 267 - DNA, 19 bp, synthetic construct
  misc_feature 1..19: note = Description of Artificial Sequence: Synthetic primer
  source 1..19: mol_type = other DNA
gggcaagtttgtgcgaagc

SEQ ID NO: 268 - DNA, 21 bp, synthetic construct
  misc_feature 1..21: note = Description of Artificial Sequence: Synthetic primer
  source 1..21: mol_type = other DNA
tggcactaccaaagtcatccc

SEQ ID NO: 269 - DNA, 19 bp, synthetic construct
  misc_feature 1..19: note = Description of Artificial Sequence: Synthetic primer
  source 1..19: mol_type = other DNA
atggtgtggtcagctcagg

SEQ ID NO: 270 - DNA, 21 bp, synthetic construct
  misc_feature 1..21: note = Description of Artificial Sequence: Synthetic primer
  source 1..21: mol_type = other DNA
tggcactaccaaagtcatccc

SEQ ID NO: 271 - DNA, 22 bp, synthetic construct
  misc_feature 1..22: note = Description of Artificial Sequence: Synthetic primer
  source 1..22: mol_type = other DNA
agaatcaagaaggacatgacgg

SEQ ID NO: 272 - DNA, 21 bp, synthetic construct
  misc_feature 1..21: note = Description of Artificial Sequence: Synthetic primer
  source 1..21: mol_type = other DNA
tttgttgaggcacttccatgc

SEQ ID NO: 273 - DNA, 21 bp, synthetic construct
  misc_feature 1..21: note = Description of Artificial Sequence: Synthetic primer
  source 1..21: mol_type = other DNA
aagtgcctcaacaaagaatgc

SEQ ID NO: 274 - DNA, 20 bp, synthetic construct
  misc_feature 1..20: note = Description of Artificial Sequence: Synthetic primer
  source 1..20: mol_type = other DNA
gttcttccaagtggggtagg

SEQ ID NO: 275 - DNA, 28 bp, synthetic construct
  misc_feature 1..28: note = Description of Artificial Sequence: Synthetic primer
  source 1..28: mol_type = other DNA
atggcgttgtcaataatgtcttcttacg

SEQ ID NO: 276 - DNA, 24 bp, synthetic construct
  misc_feature 1..24: note = Description of Artificial Sequence: Synthetic primer
  source 1..24: mol_type = other DNA
gagaactcgaaagtgatgaggagg

SEQ ID NO: 277 - DNA, 21 bp, synthetic construct
  misc_feature 1..21: note = Description of Artificial Sequence: Synthetic primer
  source 1..21: mol_type = other DNA
agcagacccatttgatgaagg

SEQ ID NO: 278 - DNA, 19 bp, synthetic construct
  misc_feature 1..19: note = Description of Artificial Sequence: Synthetic primer
  source 1..19: mol_type = other DNA
agcaggaacgaagtgaccg

SEQ ID NO: 279 - DNA, 29 bp, synthetic construct
  misc_feature 1..29: note = Description of Artificial Sequence: Synthetic primer
  source 1..29: mol_type = other DNA
gataaatacagggacgttttaagaaaagc

SEQ ID NO: 280 - DNA, 26 bp, synthetic construct
  misc_feature 1..26: note = Description of Artificial Sequence: Synthetic primer
  source 1..26: mol_type = other DNA
cctcgaagatatagtcaattcctagc

SEQ ID NO: 281 - DNA, 22 bp, synthetic construct
  misc_feature 1..22: note = Description of Artificial Sequence: Synthetic primer
  source 1..22: mol_type = other DNA
atatgaagcctcccatctatgc

SEQ ID NO: 282 - DNA, 23 bp, synthetic construct
  misc_feature 1..23: note = Description of Artificial Sequence: Synthetic primer
  source 1..23: mol_type = other DNA
ccattctcactgggatagacacc

SEQ ID NO: 283 - DNA, 22 bp, synthetic construct
  misc_feature 1..22: note = Description of Artificial Sequence: Synthetic primer
  source 1..22: mol_type = other DNA
ggtggcgagacattggtttagc

SEQ ID NO: 284 - DNA, 22 bp, synthetic construct
  misc_feature 1..22: note = Description of Artificial Sequence: Synthetic primer
  source 1..22: mol_type = other DNA
atggattttgtaagcgcaaccc

SEQ ID NO: 285 - DNA, 23 bp, synthetic construct
  misc_feature 1..23: note = Description of Artificial Sequence: Synthetic primer
  source 1..23: mol_type = other DNA
agaaaaacttccagactccatga

SEQ ID NO: 286 - DNA, 20 bp, synthetic construct
  misc_feature 1..20: note = Description of Artificial Sequence: Synthetic primer
  source 1..20: mol_type = other DNA
gctccatccacgcttttgat

SEQ ID NO: 287 - DNA, 24 bp, synthetic construct
  misc_feature 1..24: note = Description of Artificial Sequence: Synthetic primer
  source 1..24: mol_type = other DNA
tcaatgagtctagccatacgatct

SEQ ID NO: 288 - DNA, 20 bp, synthetic construct
  misc_feature 1..20: note = Description of Artificial Sequence: Synthetic primer
  source 1..20: mol_type = other DNA
tgtaaagggctccatccacg

SEQ ID NO: 289 - DNA, 19 bp, synthetic construct
  misc_feature 1..19: note = Description of Artificial Sequence: Synthetic primer
  source 1..19: mol_type = other DNA
gggcaagtttgtgcgaagc

SEQ ID NO: 290 - DNA, 21 bp, synthetic construct
  misc_feature 1..21: note = Description of Artificial Sequence: Synthetic primer
  source 1..21: mol_type = other DNA
tggcactaccaaagtcatccc

SEQ ID NO: 291 - DNA, 22 bp, synthetic construct
  misc_feature 1..22: note = Description of Artificial Sequence: Synthetic primer
  source 1..22: mol_type = other DNA
ggacatgacggatcttatgtgg

SEQ ID NO: 292 - DNA, 20 bp, synthetic construct
  misc_feature 1..20: note = Description of Artificial Sequence: Synthetic primer
  source 1..20: mol_type = other DNA
ttgttgaggcacttccatgc

SEQ ID NO: 293 - DNA, 19 bp, synthetic construct
  misc_feature 1..19: note = Description of Artificial Sequence: Synthetic primer
  source 1..19: mol_type = other DNA
atccagcgtttccaccacc

SEQ ID NO: 294 - DNA, 21 bp, synthetic construct
  misc_feature 1..21: note = Description of Artificial Sequence: Synthetic primer
  source 1..21: mol_type = other DNA
gttcttccaagtggggtaggc

SEQ ID NO: 295 - DNA, 24 bp, synthetic construct
  misc_feature 1..24: note = Description of Artificial Sequence: Synthetic primer
  source 1..24: mol_type = other DNA
accaatttgcttcatcatcatccc

SEQ ID NO: 296 - DNA, 22 bp, synthetic construct
  misc_feature 1..22: note = Description of Artificial Sequence: Synthetic primer
  source 1..22: mol_type = other DNA
aaatgggaggtccatagttggc

SEQ ID NO: 297 - DNA, 24 bp, synthetic construct
  misc_feature 1..24: note = Description of Artificial Sequence: Synthetic primer
  source 1..24: mol_type = other DNA
tgaaaaggatgctaattggagtgg

SEQ ID NO: 298 - DNA, 23 bp, synthetic construct
  misc_feature 1..23: note = Description of Artificial Sequence: Synthetic primer
  source 1..23: mol_type = other DNA
cgtagaagcctaaattggagagc

SEQ ID NO: 299 - DNA, 25 bp, synthetic construct
  misc_feature 1..25: note = Description of Artificial Sequence: Synthetic primer
  source 1..25: mol_type = other DNA
atcacaagacaggagagttcaaggc

SEQ ID NO: 300 - DNA, 24 bp, synthetic construct
  misc_feature 1..24: note = Description of Artificial Sequence: Synthetic primer
  source 1..24: mol_type = other DNA
attctccattgaagtggcatctcc

SEQ ID NO: 301 - DNA, 23 bp, synthetic construct
  misc_feature 1..23: note = Description of Artificial Sequence: Synthetic primer
  source 1..23: mol_type = other DNA
acttggagagaaattgcctttcg

SEQ ID NO: 302 - DNA, 24 bp, synthetic construct
  misc_feature 1..24: note = Description of Artificial Sequence: Synthetic primer
  source 1..24: mol_type = other DNA
tccaatgttccataaatgtcatgc

SEQ ID NO: 303 - DNA, 23 bp, synthetic construct
  misc_feature 1..23: note = Description of Artificial Sequence: Synthetic primer
  source 1..23: mol_type = other DNA
gcaagttggagtaagatttgagc

SEQ ID NO: 304 - DNA, 25 bp, synthetic construct
  misc_feature 1..25: note = Description of Artificial Sequence: Synthetic primer
  source 1..25: mol_type = other DNA
attagtgaaaagttgtagttcctcc

SEQ ID NO: 305 - DNA, 27 bp, synthetic construct
  misc_feature 1..27: note = Description of Artificial Sequence: Synthetic primer
  source 1..27: mol_type = other DNA
taagttaccagattatatgaagacagc

SEQ ID NO: 306 - DNA, 29 bp, synthetic construct
  misc_feature 1..29: note = Description of Artificial Sequence: Synthetic primer
  source 1..29: mol_type = other DNA
tttgtgaaattgtatgtaaagtagaaagc

SEQ ID NO: 307 - DNA, 22 bp, synthetic construct
  misc_feature 1..22: note = Description of Artificial Sequence: Synthetic primer
  source 1..22: mol_type = other DNA
agaatggatggttgtctgtggg

SEQ ID NO: 308 - DNA, 22 bp, synthetic construct
  misc_feature 1..22: note = Description of Artificial Sequence: Synthetic primer
  source 1..22: mol_type = other DNA
ggcgaactatgttaggatgacc

SEQ ID NO: 309 - DNA, 28 bp, synthetic construct
  misc_feature 1..28: note = Description of Artificial Sequence: Synthetic primer
  source 1..28: mol_type = other DNA
caattcaatgttatatgcacgatactgg

SEQ ID NO: 310 - DNA, 21 bp, synthetic construct
  misc_feature 1..21: note = Description of Artificial Sequence: Synthetic primer
  source 1..21: mol_type = other DNA
ctgagaagcatgtccatcgcc

SEQ ID NO: 311 - DNA, 27 bp, synthetic construct
  misc_feature 1..27: note = Description of Artificial Sequence: Synthetic primer
  source 1..27: mol_type = other DNA
attcaagtcttagcttcatctcaatta

SEQ ID NO: 312 - DNA, 22 bp, synthetic construct
  misc_feature 1..22: note = Description of Artificial Sequence: Synthetic primer
  source 1..22: mol_type = other DNA
cgatcaccccaaatagaagggt

SEQ ID NO: 313 - DNA, 28 bp, synthetic construct
  misc_feature 1..28: note = Description of Artificial Sequence: Synthetic primer
  source 1..28: mol_type = other DNA
tttgagagtgaaattgagaaattgttgg

SEQ ID NO: 314 - DNA, 30 bp, synthetic construct; identical to SEQ ID NO: 166
  misc_feature 1..30: note = Description of Artificial Sequence: Synthetic primer
  source 1..30: mol_type = other DNA

SEQ ID NO: 315 - DNA, 22 bp, synthetic construct
  misc_feature 1..22: note = Description of Artificial Sequence: Synthetic primer
  source 1..22: mol_type = other DNA
gcctaataaccgatgttccagg

SEQ ID NO: 316 - DNA, 25 bp, synthetic construct
  misc_feature 1..25: note = Description of Artificial Sequence: Synthetic primer
  source 1..25: mol_type = other DNA
gagatgtaaaacctagcatgaagcc

SEQ ID NO: 317 - DNA, 22 bp, synthetic construct
  misc_feature 1..22: note = Description of Artificial Sequence: Synthetic primer
  source 1..22: mol_type = other DNA
agaccatagagaggcttcatgc

SEQ ID NO: 318 - DNA, 28 bp, synthetic construct
  misc_feature 1..28: note = Description of Artificial Sequence: Synthetic primer
  source 1..28: mol_type = other DNA
cgtaatttcactaagttcctttttgtgg

SEQ ID NO: 319 - DNA, 22 bp, synthetic construct
  misc_feature 1..22: note = Description of Artificial Sequence: Synthetic primer
  source 1..22: mol_type = other DNA
ggtggaaggagcatgagtttgc

SEQ ID NO: 320 - DNA, 26 bp, synthetic construct
  misc_feature 1..26: note = Description of Artificial Sequence: Synthetic primer
  source 1..26: mol_type = other DNA
acctttgaattgctttggtaagaagc

SEQ ID NO: 321 - DNA, 27 bp, synthetic construct
  misc_feature 1..27: note = Description of Artificial Sequence: Synthetic primer
  source 1..27: mol_type = other DNA
gagtctcttatgtttcttctggtaacg

SEQ ID NO: 322 - DNA, 27 bp, synthetic construct
  misc_feature 1..27: note = Description of Artificial Sequence: Synthetic primer
  source 1..27: mol_type = other DNA
catgaacctagaaaggagagtagaagc

SEQ ID NO: 323 - DNA, 24 bp, synthetic construct
  misc_feature 1..24: note = Description of Artificial Sequence: Synthetic primer
  source 1..24: mol_type = other DNA
tgagcaaaagagaaatcacatacc

SEQ ID NO: 324 - DNA, 20 bp, synthetic construct
  misc_feature 1..20: note = Description of Artificial Sequence: Synthetic primer
  source 1..20: mol_type = other DNA
tttctttccagtgggtgtcc

SEQ ID NO: 325 - DNA, 20 bp, synthetic construct
  misc_feature 1..20: note = Description of Artificial Sequence: Synthetic primer
  source 1..20: mol_type = other DNA
ccagcagttgtgccctttcc

SEQ ID NO: 326 - DNA, 25 bp, synthetic construct
  misc_feature 1..25: note = Description of Artificial Sequence: Synthetic primer
  source 1..25: mol_type = other DNA
caatgctttctttgagcacttttcc

SEQ ID NO: 327 - DNA, 29 bp, synthetic construct
  misc_feature 1..29: note = Description of Artificial Sequence: Synthetic primer
  source 1..29: mol_type = other DNA
tcaagtcttagcttcatctcaattatgtg

SEQ ID NO: 328 - DNA, 21 bp, synthetic construct
  misc_feature 1..21: note = Description of Artificial Sequence: Synthetic primer
  source 1..21: mol_type = other DNA
gatcaccccaaatagaagggt

SEQ ID NO: 329 - DNA, 28 bp, synthetic construct
  misc_feature 1..28: note = Description of Artificial Sequence: Synthetic primer
  source 1..28: mol_type = other DNA
ttcgagagtgaaatcgagaaattattgg

SEQ ID NO: 330 - DNA, 28 bp, synthetic construct
  misc_feature 1..28: note = Description of Artificial Sequence: Synthetic primer
  source 1..28: mol_type = other DNA
atccactttgtcttaatagtctaaaccg

SEQ ID NO: 331 - DNA, 22 bp, synthetic construct
  misc_feature 1..22: note = Description of Artificial Sequence: Synthetic primer
  source 1..22: mol_type = other DNA
cttgctttcacaaccactcacc

SEQ ID NO: 332 - DNA, 25 bp, synthetic construct
  misc_feature 1..25: note = Description of Artificial Sequence: Synthetic primer
  source 1..25: mol_type = other DNA
cctctctatggtctttcttagaggc

SEQ ID NO: 333 - DNA, 22 bp, synthetic construct
  misc_feature 1..22: note = Description of Artificial Sequence: Synthetic primer
  source 1..22: mol_type = other DNA
ataaccgatgtttcaggtttgc

SEQ ID NO: 334 - DNA, 22 bp, synthetic construct
  misc_feature 1..22: note = Description of Artificial Sequence: Synthetic primer
  source 1..22: mol_type = other DNA
taaggtgagtggttgtgaaagc

SEQ ID NO: 335 - DNA, 28 bp, synthetic construct
  misc_feature 1..28: note = Description of Artificial Sequence: Synthetic primer
  source 1..28: mol_type = other DNA
gtgtatattatgaacccaaatactctcg

SEQ ID NO: 336 - DNA, 25 bp, synthetic construct
  misc_feature 1..25: note = Description of Artificial Sequence: Synthetic primer
  source 1..25: mol_type = other DNA
cctttgaattgctttggtaagaagc

SEQ ID NO: 337 - DNA, 28 bp, synthetic construct
  misc_feature 1..28: note = Description of Artificial Sequence: Synthetic primer
  source 1..28: mol_type = other DNA
gaactattggaggttattttgaagaagc

SEQ ID NO: 338 - DNA, 26 bp, synthetic construct
  misc_feature 1..26: note = Description of Artificial Sequence: Synthetic primer
  source 1..26: mol_type = other DNA
gagtggaagctgaaacaatcttaggg

SEQ ID NO: 339 - DNA, 24 bp, synthetic construct
  misc_feature 1..24: note = Description of Artificial Sequence: Synthetic primer
  source 1..24: mol_type = other DNA
tgagcaagagagaaatcacatacc

SEQ ID NO: 340 - DNA, 26 bp, synthetic construct
  misc_feature 1..26: note = Description of Artificial Sequence: Synthetic primer
  source 1..26: mol_type = other DNA
agaacacgaagtaagataggaaaagg

SEQ ID NO: 341 - DNA, 30 bp, synthetic construct
  misc_feature 1..30: note = Description of Artificial Sequence: Synthetic primer
  source 1..30: mol_type = other DNA
cacacaaatcttagtatcattatcttcaaa

SEQ ID NO: 342 - DNA, 28 bp, synthetic construct
  misc_feature 1..28: note = Description of Artificial Sequence: Synthetic primer
  source 1..28: mol_type = other DNA
caaatcttgttgtgaaatgttgtaatgt

SEQ ID NO: 343 - DNA, 22 bp, synthetic construct
  misc_feature 1..22: note = Description of Artificial Sequence: Synthetic primer
  source 1..22: mol_type = other DNA
tgtcaacaacaaaaggttgagg

SEQ ID NO: 344 - DNA, 26 bp, synthetic construct
  misc_feature 1..26: note = Description of Artificial Sequence: Synthetic primer
  source 1..26: mol_type = other DNA
tcaaaatgataagacaatcccaaacg

SEQ ID NO: 345 - DNA, 23 bp, synthetic construct
  misc_feature 1..23: note = Description of Artificial Sequence: Synthetic primer
  source 1..23: mol_type = other DNA
gaacaccatgaagacgatgatcc

SEQ ID NO: 346 - DNA, 20 bp, synthetic construct
  misc_feature 1..20: note = Description of Artificial Sequence: Synthetic primer
  source 1..20: mol_type = other DNA
tgctgacttcactaagctcc

SEQ ID NO: 347 - DNA, 23 bp, synthetic construct
  misc_feature 1..23: note = Description of Artificial Sequence: Synthetic primer
  source 1..23: mol_type = other DNA
tgcttggtaagtgatacccttgg

SEQ ID NO: 348 - DNA, 19 bp, synthetic construct
  misc_feature 1..19: note = Description of Artificial Sequence: Synthetic primer
  source 1..19: mol_type = other DNA
agggcctctctagggctcg

SEQ ID NO: 349 - DNA, 25 bp, synthetic construct
  misc_feature 1..25: note = Description of Artificial Sequence: Synthetic primer
  source 1..25: mol_type = other DNA
tgcaagagataggattgtggaattg

SEQ ID NO: 350 - DNA, 25 bp, synthetic construct
  misc_feature 1..25: note = Description of Artificial Sequence: Synthetic primer
  source 1..25: mol_type = other DNA
actcaagttcttcaagtgtaccata

SEQ ID NO: 351 - DNA, 25 bp, synthetic construct
  misc_feature 1..25: note = Description of Artificial Sequence: Synthetic primer
  source 1..25: mol_type = other DNA
ttgttatgaagagtttgagcaactg

SEQ ID NO: 352 - DNA, 29 bp, synthetic construct
  misc_feature 1..29: note = Description of Artificial Sequence: Synthetic primer
  source 1..29: mol_type = other DNA
actctgtatgtttcttctttttctagcag

SEQ ID NO: 353 - DNA, 23 bp, synthetic construct
  misc_feature 1..23: note = Description of Artificial Sequence: Synthetic primer
  source 1..23: mol_type = other DNA
tttgaatgaagctcgatgtttgc

SEQ ID NO: 354 - DNA, 28 bp, synthetic construct
  misc_feature 1..28: note = Description of Artificial Sequence: Synthetic primer
  source 1..28: mol_type = other DNA
ccattagcctacaaatagtaacagatgc

SEQ ID NO: 355 - DNA, 20 bp, synthetic construct
  misc_feature 1..20: note = Description of Artificial Sequence: Synthetic primer
  source 1..20: mol_type = other DNA
gcgtttgtgaagaggaagcc

SEQ ID NO: 356 - DNA, 23 bp, synthetic construct
  misc_feature 1..23: note = Description of Artificial Sequence: Synthetic primer
  source 1..23: mol_type = other DNA
acccttgaaaagttaagagcacg

SEQ ID NO: 357 - DNA, 27 bp, synthetic construct
  misc_feature 1..27: note = Description of Artificial Sequence: Synthetic primer
  source 1..27: mol_type = other DNA
agaaataaatgaagagtttttgaagcc

SEQ ID NO: 358 - DNA, 21 bp, synthetic construct
  misc_feature 1..21: note = Description of Artificial Sequence: Synthetic primer
  source 1..21: mol_type = other DNA
tggatgaataagcaaagcagc

SEQ ID NO: 359 - DNA, 24 bp, synthetic construct
  misc_feature 1..24: note = Description of Artificial Sequence: Synthetic primer
  source 1..24: mol_type = other DNA
gctcaagtctatgttgaaggaagc

SEQ ID NO: 360 - DNA, 24 bp, synthetic construct
  misc_feature 1..24: note = Description of Artificial Sequence: Synthetic primer
  source 1..24: mol_type = other DNA
aacatcctcagaaagcataggtcc

SEQ ID NO: 361 - DNA, 23 bp, synthetic construct
  misc_feature 1..23: note = Description of Artificial Sequence: Synthetic primer
  source 1..23: mol_type = other DNA
tcaatggttgaaatacgagaccg

SEQ ID NO: 362 - DNA, 19 bp, synthetic construct
  misc_feature 1..19: note = Description of Artificial Sequence: Synthetic primer
  source 1..19: mol_type = other DNA
atcgttgagaagtcgtccg

SEQ ID NO: 363 - DNA, 19 bp, synthetic construct
  misc_feature 1..19: note = Description of Artificial Sequence: Synthetic primer
  source 1..19: mol_type = other DNA
cgcgtggttttggctctgg

SEQ ID NO: 364 - DNA, 21 bp, synthetic construct
  misc_feature 1..21: note = Description of Artificial Sequence: Synthetic primer
  source 1..21: mol_type = other DNA
ggtgaatccgtcgtcattggc

SEQ ID NO: 365 - DNA, 22 bp, synthetic construct
  misc_feature 1..22: note = Description of Artificial Sequence: Synthetic primer
  source 1..22: mol_type = other DNA
tgcattccaacattaggtgctc

SEQ ID NO: 366 - DNA, 23 bp, synthetic construct
  misc_feature 1..23: note = Description of Artificial Sequence: Synthetic primer
  source 1..23: mol_type = other DNA
tgcttttccttgcaccatttagt

SEQ ID NO: 367 - DNA, 20 bp, synthetic construct
  misc_feature 1..20: note = Description of Artificial Sequence: Synthetic primer
  source 1..20: mol_type = other DNA
ttatgacactgcctgggtgg

SEQ ID NO: 368 - DNA, 20 bp, synthetic construct
  misc_feature 1..20: note = Description of Artificial Sequence: Synthetic primer
  source 1..20: mol_type = other DNA
gaggaagaccccatgaaccg

SEQ ID NO: 369 - DNA, 21 bp, synthetic construct
  misc_feature 1..21: note = Description of Artificial Sequence: Synthetic primer
  source 1..21: mol_type = other DNA
agagaatcagcactctgacgg

SEQ ID NO: 370 - DNA, 19 bp, synthetic construct
  misc_feature 1..19: note = Description of Artificial Sequence: Synthetic primer
  source 1..19: mol_type = other DNA
caccccatcgcttcattgc

SEQ ID NO: 371 - DNA, 20 bp, synthetic construct
  misc_feature 1..20: note = Description of Artificial Sequence: Synthetic primer
  source 1..20: mol_type = other DNA
tcaggaagctactcagaggg

SEQ ID NO: 372 - DNA, 23 bp, synthetic construct
  misc_feature 1..23: note = Description of Artificial Sequence: Synthetic primer
  source 1..23: mol_type = other DNA
acagagaaccatttttcctttgg

SEQ ID NO: 373 - DNA, 22 bp, synthetic construct
  misc_feature 1..22: note = Description of Artificial Sequence: Synthetic primer
  source 1..22: mol_type = other DNA
tatgctcgtctctcaatggtgg

SEQ ID NO: 374 - DNA, 21 bp, synthetic construct
  misc_feature 1..21: note = Description of Artificial Sequence: Synthetic primer
  source 1..21: mol_type = other DNA
agaacacactcctctccttgc

SEQ ID NO: 375 - DNA, 21 bp, synthetic construct
  misc_feature 1..21: note = Description of Artificial Sequence: Synthetic primer
  source 1..21: mol_type = other DNA
tccgagatcatcatacaccca

SEQ ID NO: 376 - DNA, 22 bp, synthetic construct
  misc_feature 1..22: note = Description of Artificial Sequence: Synthetic primer
  source 1..22: mol_type = other DNA
tctcccctagttgaaatgctgt

SEQ ID NO: 377 - DNA, 30 bp, synthetic construct
  misc_feature 1..30: note = Description of Artificial Sequence: Synthetic primer
  source 1..30: mol_type = other DNA
gaaaacttcatattgttcctcaaatgttcg

SEQ ID NO: 378 - DNA, 25 bp, synthetic construct
  misc_feature 1..25: note = Description of Artificial Sequence: Synthetic primer
  source 1..25: mol_type = other DNA
gagttcttcacggtgtattgattgg

SEQ ID NO: 379 - DNA, 23 bp, synthetic construct
  misc_feature 1..23: note = Description of Artificial Sequence: Synthetic primer
  source 1..23: mol_type = other DNA
gtgggttgtagagaataggttgg

SEQ ID NO: 380 - DNA, 21 bp, synthetic construct
  misc_feature 1..21: note = Description of Artificial Sequence: Synthetic primer
  source 1..21: mol_type = other DNA
gcgggcatcagataattcagg

SEQ ID NO: 381 - DNA, 21 bp, synthetic construct
  misc_feature 1..21: note = Description of Artificial Sequence: Synthetic primer
  source 1..21: mol_type = other DNA
cctgaattatctgatgcccgc

SEQ ID NO: 382 - DNA, 22 bp, synthetic construct
  misc_feature 1..22: note = Description of Artificial Sequence: Synthetic primer
  source 1..22: mol_type = other DNA
ctagttcctcttctgaacctcc

SEQ ID NO: 383 - DNA, 23 bp, synthetic construct
  misc_feature 1..23: note = Description of Artificial Sequence: Synthetic primer
  source 1..23: mol_type = other DNA
cagtgttgattgtttgtcggagc

SEQ ID NO: 384 - DNA, 20 bp, synthetic construct
  misc_feature 1..20: note = Description of Artificial Sequence: Synthetic primer
  source 1..20: mol_type = other DNA
ttgtcacactacgtccttgc

SEQ ID NO: 385 - DNA, 25 bp, synthetic construct
  misc_feature 1..25: note = Description of Artificial Sequence: Synthetic primer
  source 1..25: mol_type = other DNA
aagatcagccaactatgatcctccc

SEQ ID NO: 386 - DNA, 30 bp, synthetic construct
  misc_feature 1..30: note = Description of Artificial Sequence: Synthetic primer
  source 1..30: mol_type = other DNA
atggaagagactgaatgaaatcaaaagacc

SEQ ID NO: 387 - DNA, 25 bp, synthetic construct
  misc_feature 1..25: note = Description of Artificial Sequence: Synthetic primer
  source 1..25: mol_type = other DNA
ttagaagatcagccaactatgatcc

SEQ ID NO: 388 - DNA, 25 bp, synthetic construct
  misc_feature 1..25: note = Description of Artificial Sequence: Synthetic primer
  source 1..25: mol_type = other DNA
gaatgaaatcaaaagaccaaatggg

SEQ ID NO: 389 - DNA, 29 bp, synthetic construct
  misc_feature 1..29: note = Description of Artificial Sequence: Synthetic primer
  source 1..29: mol_type = other DNA
aaagaagaagtgaaaaagatgttagttgg

SEQ ID NO: 390 - DNA, 25 bp, synthetic construct
  misc_feature 1..25: note = Description of Artificial Sequence: Synthetic primer
  source 1..25: mol_type = other DNA
aaaagcctaaattcgagagcagtgg

SEQ ID NO: 391 - DNA, 21 bp, synthetic construct
  misc_feature 1..21: note = Description of Artificial Sequence: Synthetic primer
  source 1..21: mol_type = other DNA
gagacgggaaagttcaaagcg

SEQ ID NO: 392 - DNA, 20 bp, synthetic construct
  misc_feature 1..20: note = Description of Artificial Sequence: Synthetic primer
  source 1..20: mol_type = other DNA
tgaagtggcatctccaaggc

SEQ ID NO: 393 - DNA, 25 bp, synthetic construct
  misc_feature 1..25: note = Description of Artificial Sequence: Synthetic primer
  source 1..25: mol_type = other DNA
gcttcattctatgtgaaaaatggcg

SEQ ID NO: 394 - DNA, 20 bp, synthetic construct
  misc_feature 1..20: note = Description of Artificial Sequence: Synthetic primer
  source 1..20: mol_type = other DNA
cgcaaattcaagcaaagtgc

SEQ ID NO: 395 - DNA, 27 bp, synthetic construct
  misc_feature 1..27: note = Description of Artificial Sequence: Synthetic primer
  source 1..27: mol_type = other DNA
aaatggtttatgctagagatagattgg

SEQ ID NO: 396 - DNA, 25 bp, synthetic construct
  misc_feature 1..25: note = Description of Artificial Sequence: Synthetic primer
  source 1..25: mol_type = other DNA
cttgcagatattctcctaaagtggc

SEQ ID NO: 397 - DNA, 20 bp, synthetic construct
  misc_feature 1..20: note = Description of Artificial Sequence: Synthetic primer
  source 1..20: mol_type = other DNA
agaggcttttctatggcagg

SEQ ID NO: 398 - DNA, 24 bp, synthetic construct
  misc_feature 1..24: note = Description of Artificial Sequence: Synthetic primer
  source 1..24: mol_type = other DNA
aagctctaattcttccaatgttcc

SEQ ID NO: 399 - DNA, 27 bp, synthetic construct
  misc_feature 1..27: note = Description of Artificial Sequence: Synthetic primer
  source 1..27: mol_type = other DNA
tgcctttctttactttatttaacaccg

SEQ ID NO: 400 - DNA, 23 bp, synthetic construct
  misc_feature 1..23: note = Description of Artificial Sequence: Synthetic primer
  source 1..23: mol_type = other DNA
gctcttctaacacatcatacgcc

SEQ ID NO: 401 - DNA, 20 bp, synthetic construct
  misc_feature 1..20: note = Description of Artificial Sequence: Synthetic primer
  source 1..20: mol_type = other DNA
acaccgtaaatgaaatggcg

SEQ ID NO: 402 - DNA, 23 bp, synthetic construct
  misc_feature 1..23: note = Description of Artificial Sequence: Synthetic primer
  source 1..23: mol_type = other DNA
cgagttcttgaggtattcaacgc

SEQ ID NO: 403 - DNA, 21 bp, synthetic construct
  misc_feature 1..21: note = Description of Artificial Sequence: Synthetic primer
  source 1..21: mol_type = other DNA
tgggcagagttatgtagatgc

SEQ ID NO: 404 - DNA, 19 bp, synthetic construct
  misc_feature 1..19: note = Description of Artificial Sequence: Synthetic primer
  source 1..19: mol_type = other DNA
tcctattgaaagcgaggcg

SEQ ID NO: 405 - DNA, 19 bp, synthetic construct
  misc_feature 1..19: note = Description of Artificial Sequence: Synthetic primer
  source 1..19: mol_type = other DNA
acgcctcgctttcaatagg

SEQ ID NO: 406 - DNA, 21 bp, synthetic construct
  misc_feature 1..21: note = Description of Artificial Sequence: Synthetic primer
  source 1..21: mol_type = other DNA
ctgcaagtcgtaacatcaagg

SEQ ID NO: 407 - DNA, 26 bp, synthetic construct
  misc_feature 1..26: note = Description of Artificial Sequence: Synthetic primer
  source 1..26: mol_type = other DNA
tggaagaggcaaaatggttttatagc

SEQ ID NO: 408 - DNA, 27 bp, synthetic construct
  misc_feature 1..27: note = Description of Artificial Sequence: Synthetic primer
  source 1..27: mol_type = other DNA
gatcatctgcaagtcgtaacatcaagg

SEQ ID NO: 409 - DNA, 24 bp, synthetic construct
  misc_feature 1..24: note = Description of Artificial Sequence: Synthetic primer
  source 1..24: mol_type = other DNA
aaagaggtgacattcttaaatcgg

SEQ ID NO: 410 - DNA, 29 bp, synthetic construct
  misc_feature 1..29: note = Description of Artificial Sequence: Synthetic primer
  source 1..29: mol_type = other DNA
agttatattcatcttcatcattcatctcc

SEQ ID NO: 411 - DNA, 23 bp, synthetic construct
  misc_feature 1..23: note = Description of Artificial Sequence: Synthetic primer
  source 1..23: mol_type = other DNA
ggtgtttctgaagatgaagctcg

SEQ ID NO: 412 - DNA, 24 bp, synthetic construct
  misc_feature 1..24: note = Description of Artificial Sequence: Synthetic primer
  source 1..24: mol_type = other DNA
ctgaaatacgtttccttgaatggc

SEQ ID NO: 413 - DNA, 26 bp, synthetic construct
  misc_feature 1..26: note = Description of Artificial Sequence: Synthetic primer
  source 1..26: mol_type = other DNA
tctcgaagatcagcaaactatcaacc

SEQ ID NO: 414 - DNA, 24 bp, synthetic construct
  misc_feature 1..24: note = Description of Artificial Sequence: Synthetic primer
  source 1..24: mol_type = other DNA
acataatcaaattgccaaagtggg

SEQ ID NO: 415 - DNA, 27 bp, synthetic construct
  misc_feature 1..27: note = Description of Artificial Sequence: Synthetic primer
  source 1..27: mol_type = other DNA
agacttggaatctcttatcactttgag

SEQ ID NO: 416 - DNA, 27 bp, synthetic construct
  misc_feature 1..27: note = Description of Artificial Sequence: Synthetic primer
  source 1..27: mol_type = other DNA
ggcatacacattatttttgttggtgtt

SEQ ID NO: 417 - DNA, 26 bp, synthetic construct
  misc_feature 1..26: note = Description of Artificial Sequence: Synthetic primer
  source 1..26: mol_type = other DNA
gtacaacaccaacaaaaataatgtgt

SEQ ID NO: 418 - DNA, 25 bp, synthetic construct
  misc_feature 1..25: note = Description of Artificial Sequence: Synthetic primer
  source 1..25: mol_type = other DNA
tcgtaggagtctaaattcaagagaa

SEQ ID NO: 419 - DNA, 23 bp, synthetic construct
  misc_feature 1..23: note = Description of Artificial Sequence: Synthetic primer
  source 1..23: mol_type = other DNA
gaggcaattttatggtgtgtacc

SEQ ID NO: 420 - DNA, 23 bp, synthetic construct
  misc_feature 1..23: note = Description of Artificial Sequence: Synthetic primer
  source 1..23: mol_type = other DNA
ttgttttgtgtcttgtctcttcc

SEQ ID NO: 421 - DNA, 20 bp, synthetic construct
  misc_feature 1..20: note = Description of Artificial Sequence: Synthetic primer
  source 1..20: mol_type = other DNA
tgggaaagcactgatatggg

SEQ ID NO: 422 - DNA, 23 bp, synthetic construct
  misc_feature 1..23: note = Description of Artificial Sequence: Synthetic primer
  source 1..23: mol_type = other DNA
agctccaattcatctagtgtacc

SEQ ID NO: 423 - DNA, 23 bp, synthetic construct
  misc_feature 1..23: note = Description of Artificial Sequence: Synthetic primer
  source 1..23: mol_type = other DNA
tgggacattagtgctatggatgg

SEQ ID NO: 424 - DNA, 27 bp, synthetic construct
  misc_feature 1..27: note = Description of Artificial Sequence: Synthetic primer
  source 1..27: mol_type = other DNA
tctgaaggaattttattatatggaggc

SEQ ID NO: 425 - DNA, 26 bp, synthetic construct
  misc_feature 1..26: note = Description of Artificial Sequence: Synthetic primer
  source 1..26: mol_type = other DNA
agatttgaagagtacattgagaatgc

SEQ ID NO: 426 - DNA, 25 bp, synthetic construct
  misc_feature 1..25: note = Description of Artificial Sequence: Synthetic primer
  source 1..25: mol_type = other DNA
cgatgaatgtcgtattatggtaggg

SEQ ID NO: 427 - DNA, 21 bp, synthetic construct
  misc_feature 1..21: note = Description of Artificial Sequence: Synthetic primer
  source 1..21: mol_type = other DNA
agaggaagctcgtcaacgtat

SEQ ID NO: 428 - DNA, 21 bp, synthetic construct
  misc_feature 1..21: note = Description of Artificial Sequence: Synthetic primer
  source 1..21: mol_type = other DNA
atgtgccattctaccaaggtt

SEQ ID NO: 429 - DNA, 25 bp, synthetic construct
  misc_feature 1..25: note = Description of Artificial Sequence: Synthetic primer
  source 1..25: mol_type = other DNA
gacttggaatctcttaccactttga

SEQ ID NO: 430 - DNA, 25 bp, synthetic construct
  misc_feature 1..25: note = Description of Artificial Sequence: Synthetic primer
  source 1..25: mol_type = other DNA
accatgttgtcttaggagtctaaat

SEQ ID NO: 431 - DNA, 25 bp, synthetic construct
  misc_feature 1..25: note = Description of Artificial Sequence: Synthetic primer
  source 1..25: mol_type = other DNA
gaatagttctcgaagatcagcaaac

SEQ ID NO: 432 - DNA, 20 bp, synthetic construct
  misc_feature 1..20: note = Description of Artificial Sequence: Synthetic primer
  source 1..20: mol_type = other DNA
caaattgccaaagtgggggt

SEQ ID NO: 433 - DNA, 24 bp, synthetic construct
  misc_feature 1..24: note = Description of Artificial Sequence: Synthetic primer
  source 1..24: mol_type = other DNA
gcaaagacttggaatctcttacca

SEQ ID NO: 434 - DNA, 22 bp, synthetic construct
  misc_feature 1..22: note = Description of Artificial Sequence: Synthetic primer
  source 1..22: mol_type = other DNA
gagacaccggataaccatgttg

SEQ ID NO: 435 - DNA, 23 bp, synthetic construct
  misc_feature 1..23: note = Description of Artificial Sequence: Synthetic primer
  source 1..23: mol_type = other DNA
gaggcaattttatggtgtcttcc

SEQ ID NO: 436 - DNA, 22 bp, synthetic construct
  misc_feature 1..22: note = Description of Artificial Sequence: Synthetic primer
  source 1..22: mol_type = other DNA
tgttgtgtgtcttgtctcttcc

SEQ ID NO: 437 - DNA, 20 bp, synthetic construct
  misc_feature 1..20: note = Description of Artificial Sequence: Synthetic primer
  source 1..20: mol_type = other DNA
gtgggaaagcactggtatgg

SEQ ID NO: 438 - DNA, 23 bp, synthetic construct
  misc_feature 1..23: note = Description of Artificial Sequence: Synthetic primer
  source 1..23: mol_type = other DNA
agctccaattcatctagtgtacc

SEQ ID NO: 439 - DNA, 21 bp, synthetic construct
  misc_feature 1..21: note = Description of Artificial Sequence: Synthetic primer
  source 1..21: mol_type = other DNA
ttagtgctatggatgggctcc

SEQ ID NO: 440 - DNA, 28 bp, synthetic construct
  misc_feature 1..28: note = Description of Artificial Sequence: Synthetic primer
  source 1..28: mol_type = other DNA
cgatttctgaaggacttttattatatgg

SEQ ID NO: 441 - DNA, 26 bp, synthetic construct
  misc_feature 1..26: note = Description of Artificial Sequence: Synthetic primer
  source 1..26: mol_type = other DNA
agagaagcaagatggtattatgatgg

SEQ ID NO: 442 - DNA, 25 bp, synthetic construct
  misc_feature 1..25: note = Description of Artificial Sequence: Synthetic primer
  source 1..25: mol_type = other DNA
cgatgaatgtcgtattatggtaggg

SEQ ID NO: 443 - DNA, 21 bp, synthetic construct
  misc_feature 1..21: note = Description of Artificial Sequence: Synthetic primer
  source 1..21: mol_type = other DNA
tggcgtgtctgaagaagaagc

SEQ ID NO: 444 - DNA, 23 bp, synthetic construct
  misc_feature 1..23: note = Description of Artificial Sequence: Synthetic primer
  source 1..23: mol_type = other DNA
aacattggagagtagtcatcacc

SEQ ID NO: 445 - DNA, 23 bp, synthetic construct
  misc_feature 1..23: note = Description of Artificial Sequence: Synthetic primer
  source 1..23: mol_type = other DNA
catgatggtgatgactactctcc

SEQ ID NO: 446 - DNA, 23 bp, synthetic construct
  misc_feature 1..23: note = Description of Artificial Sequence: Synthetic primer
  source 1..23: mol_type = other DNA
agtacatgatcttttgtttggcg

SEQ ID NO: 447 - DNA, 22 bp, synthetic construct
  misc_feature 1..22: note = Description of Artificial Sequence: Synthetic primer
  source 1..22: mol_type = other DNA
tgcaaagaagaacgagtgaagg

SEQ ID NO: 448 - DNA, 30 bp, synthetic construct
  misc_feature 1..30: note = Description of Artificial Sequence: Synthetic primer
  source 1..30: mol_type = other DNA
tgtttgtagtagtttagatcatgtttttcc

SEQ ID NO: 449 - DNA, 22 bp, synthetic construct
  misc_feature 1..22: note = Description of Artificial Sequence: Synthetic primer
  source 1..22: mol_type = other DNA
ataaccgatgtttcgggtttgc

SEQ ID NO: 450 - DNA, 25 bp, synthetic construct
  misc_feature 1..25: note = Description of Artificial Sequence: Synthetic primer
  source 1..25: mol_type = other DNA
cctctctatggtctttcttaatggc

SEQ ID NO: 451 - DNA, 25 bp, synthetic construct
  misc_feature 1..25: note = Description of Artificial Sequence: Synthetic primer
  source 1..25: mol_type = other DNA
gaaagctaacaaccaaaatctctgc

SEQ ID NO: 452 - DNA, 22 bp, synthetic construct
  misc_feature 1..22: note = Description of Artificial Sequence: Synthetic primer
  source 1..22: mol_type = other DNA
ttgcatggcttgggtaagaagc

SEQ ID NO: 453 - DNA, 23 bp, synthetic construct
  misc_feature 1..23: note = Description of Artificial Sequence: Synthetic primer
  source 1..23: mol_type = other DNA
agaagaagctcgatggttgaacg

SEQ ID NO: 454 - DNA, 23 bp, synthetic construct
  misc_feature 1..23: note = Description of Artificial Sequence: Synthetic primer
  source 1..23: mol_type = other DNA
catgaacctagcaagtagagtgg

SEQ ID NO: 455 - DNA, 21 bp, synthetic construct
  misc_feature 1..21: note = Description of Artificial Sequence: Synthetic primer
  source 1..21: mol_type = other DNA
gccaactgttatgcctttccc

SEQ ID NO: 456 - DNA, 26 bp, synthetic construct
  misc_feature 1..26: note = Description of Artificial Sequence: Synthetic primer
  source 1..26: mol_type = other DNA
gggattggatctataagtaaagcagc

SEQ ID NO: 457 - DNA, 21 bp, synthetic construct
  misc_feature 1..21: note = Description of Artificial Sequence: Synthetic primer
  source 1..21: mol_type = other DNA
atgctaccccatccaatgtgc

SEQ ID NO: 458 - DNA, 28 bp, synthetic construct
  misc_feature 1..28: note = Description of Artificial Sequence: Synthetic primer
  source 1..28: mol_type = other DNA
aatataatcgaaagaccaaatggagggc

SEQ ID NO: 459 - DNA, 27 bp, synthetic construct
  misc_feature 1..27: note = Description of Artificial Sequence: Synthetic primer
  source 1..27: mol_type = other DNA
attagttgagatggaaaactctttagc

SEQ ID NO: 460 - DNA, 23 bp, synthetic construct
  misc_feature 1..23: note = Description of Artificial Sequence: Synthetic primer
  source 1..23: mol_type = other DNA
atagccatgttgacgtagaagcc

SEQ ID NO: 461 - DNA, 20 bp, synthetic construct
  misc_feature 1..20: note = Description of Artificial Sequence: Synthetic primer
  source 1..20: mol_type = other DNA
agctcccacttcatcggagg

SEQ ID NO: 462 - DNA, 24 bp, synthetic construct
  misc_feature 1..24: note = Description of Artificial Sequence: Synthetic primer
  source 1..24: mol_type = other DNA
tttggctaactcaagcaacatagg

SEQ ID NO: 463 - DNA, 28 bp, synthetic construct
  misc_feature 1..28: note = Description of Artificial Sequence: Synthetic primer
  source 1..28: mol_type = other DNA
agacatactaaacttggagagaaattga

SEQ ID NO: 464 - DNA, 28 bp, synthetic construct
  misc_feature 1..28: note = Description of Artificial Sequence: Synthetic primer
  source 1..28: mol_type = other DNA
tattccataagaaacattccatcaatcg

SEQ ID NO: 465 - DNA, 24 bp, synthetic construct
  misc_feature 1..24: note = Description of Artificial Sequence: Synthetic primer
  source 1..24: mol_type = other DNA
ggagacatactaaacttggagaga

SEQ ID NO: 466 - DNA, 25 bp, synthetic construct
  misc_feature 1..25: note = Description of Artificial Sequence: Synthetic primer
  source 1..25: mol_type = other DNA
gctttggtgaaaagctctaattcat

SEQ ID NO: 467 - DNA, 25 bp, synthetic construct
  misc_feature 1..25: note = Description of Artificial Sequence: Synthetic primer
  source 1..25: mol_type = other DNA
agttaccagaatacatgaagatgcc

SEQ ID NO: 468 - DNA, 24 bp, synthetic construct
  misc_feature 1..24: note = Description of Artificial Sequence: Synthetic primer
  source 1..24: mol_type = other DNA
tgaatgttgatggagatttcttgg

SEQ ID NO: 469 - DNA, 24 bp, synthetic construct
  misc_feature 1..24: note = Description of Artificial Sequence: Synthetic primer
  source 1..24: mol_type = other DNA
aaatggttggatttcagtaggagc

SEQ ID NO: 470 - DNA, 30 bp, synthetic construct
  misc_feature 1..30: note = Description of Artificial Sequence: Synthetic primer
  source 1..30: mol_type = other DNA
gaaaatctctttagtatttgtaattgtgcc

SEQ ID NO: 471 - DNA, 23 bp, synthetic construct
  misc_feature 1..23: note = Description of Artificial Sequence: Synthetic primer
  source 1..23: mol_type = other DNA
aattgaaaagaggtgatgctccg

SEQ ID NO: 472 - DNA, 30 bp, synthetic construct
  misc_feature 1..30: note = Description of Artificial Sequence: Synthetic primer
  source 1..30: mol_type = other DNA
tttggattgattatcttgagaactatgacc

SEQ ID NO: 473 - DNA, 22 bp, synthetic construct
  misc_feature 1..22: note = Description of Artificial Sequence: Synthetic primer
  source 1..22: mol_type = other DNA
aaagatcaaccagcagcaatcg

SEQ ID NO: 474 - DNA, 23 bp, synthetic construct
  misc_feature 1..23: note = Description of Artificial Sequence: Synthetic primer
  source 1..23: mol_type = other DNA
gtgggtttgtagtttcctgatcg

SEQ ID NO: 475 - DNA, 28 bp, synthetic construct
  misc_feature 1..28: note = Description of Artificial Sequence: Synthetic primer
  source 1..28: mol_type = other DNA
aaggagagtgaaaatcctttagttaagc

SEQ ID NO: 476 - DNA, 24 bp, synthetic construct
  misc_feature 1..24: note = Description of Artificial Sequence: Synthetic primer
  source 1..24: mol_type = other DNA
gagtttgaaatgaagagcagtggc

SEQ ID NO: 477 - DNA, 25 bp, synthetic construct
  misc_feature 1..25: note = Description of Artificial Sequence: Synthetic primer
  source 1..25: mol_type = other DNA
aatgccttcaaaaacgagcaaaagg

SEQ ID NO: 478 - DNA, 28 bp, synthetic construct
  misc_feature 1..28: note = Description of Artificial Sequence: Synthetic primer
  source 1..28: mol_type = other DNA
gtcatcaagtattgtttgagatgtttgg

SEQ ID NO: 479 - DNA, 21 bp, synthetic construct
  misc_feature 1..21: note = Description of Artificial Sequence: Synthetic primer
  source 1..21: mol_type = other DNA
tggcattgaaatatgaggcgg

SEQ ID NO: 480 - DNA, 22 bp, synthetic construct
  misc_feature 1..22: note = Description of Artificial Sequence: Synthetic primer
  source 1..22: mol_type = other DNA
gctgaagctcatctagtgtacc

SEQ ID NO: 481 - DNA, 25 bp, synthetic construct
  misc_feature 1..25: note = Description of Artificial Sequence: Synthetic primer
  source 1..25: mol_type = other DNA
ataaatgaactggatcagctacccg

SEQ ID NO: 482 - DNA, 28 bp, synthetic construct
  misc_feature 1..28: note = Description of Artificial Sequence: Synthetic primer
  source 1..28: mol_type = other DNA
gatggtgtgaatcccattttctttgagg

SEQ ID NO: 483 - DNA, 21 bp, synthetic construct
  misc_feature 1..21: note = Description of Artificial Sequence: Synthetic primer
  source 1..21: mol_type = other DNA
ttgggggatctgtgtaaatgc

SEQ ID NO: 484 - DNA, 24 bp, synthetic construct
  misc_feature 1..24: note = Description of Artificial Sequence: Synthetic primer
  source 1..24: mol_type = other DNA
cagttcctgagacacgtaaaatgg

SEQ ID NO: 485 - DNA, 20 bp, synthetic construct
  misc_feature 1..20: note = Description of Artificial Sequence: Synthetic primer
  source 1..20: mol_type = other DNA
gcagtgcatggcttttcacc

SEQ ID NO: 486 - DNA, 22 bp, synthetic construct
  misc_feature 1..22: note = Description of Artificial Sequence: Synthetic primer
  source 1..22: mol_type = other DNA
tccaaatagggagggatgatga

SEQ ID NO: 487 - DNA, 24 bp, synthetic construct
  misc_feature 1..24: note = Description of Artificial Sequence: Synthetic primer
  source 1..24: mol_type = other DNA
acaatgtactgtggtcgataaccc

SEQ ID NO: 488 - DNA, 27 bp, synthetic construct
  misc_feature 1..27: note = Description of Artificial Sequence: Synthetic primer
  source 1..27: mol_type = other DNA
aatgaaatcaaaagaccaaatgggagg

SEQ ID NO: 489 - DNA, 25 bp, synthetic construct
  misc_feature 1..25: note = Description of Artificial Sequence: Synthetic primer
  source 1..25: mol_type = other DNA
gagaaagacgtgaaaaggatactgg

SEQ ID NO: 490 - DNA, 24 bp, synthetic construct
  misc_feature 1..24: note = Description of Artificial Sequence: Synthetic primer
  source 1..24: mol_type = other DNA
tcaaatccatattggcgtagaagc

SEQ ID NO: 491 - DNA, 24 bp, synthetic construct
  misc_feature 1..24: note = Description of Artificial Sequence: Synthetic primer
  source 1..24: mol_type = other DNA
agcttcattctatgggaaaaaggg

SEQ ID NO: 492 - DNA, 21 bp, synthetic construct
  misc_feature 1..21: note = Description of Artificial Sequence: Synthetic primer
  source 1..21: mol_type = other DNA
tgaaccacctagcttccaacc

SEQ ID NO: 493 - DNA, 29 bp, synthetic construct
  misc_feature 1..29: note = Description of Artificial Sequence: Synthetic primer
  source 1..29: mol_type = other DNA
gcaatctaaacttggagaaaagaaaatgg

SEQ ID NO: 494 - DNA, 24 bp, synthetic construct
  misc_feature 1..24: note = Description of Artificial Sequence: Synthetic primer
  source 1..24: mol_type = other DNA
tttgtgaaaagctctaattcctcc

SEQ ID NO: 495 - DNA, 27 bp, synthetic construct
  misc_feature 1..27: note = Description of Artificial Sequence: Synthetic primer
  source 1..27: mol_type = other DNA
catgcttattttgctttcacaaatccc

SEQ ID NO: 496 - DNA, 29 bp, synthetic construct
  misc_feature 1..29: note = Description of Artificial Sequence: Synthetic primer
  source 1..29: mol_type = other DNA
taggtcatcttcaagtcgtaaaagtatgg

SEQ ID NO: 497 - DNA, 24 bp, synthetic construct
  misc_feature 1..24: note = Description of Artificial Sequence: Synthetic primer
  source 1..24: mol_type = other DNA
gagatgaaaagaggagatgttccg

SEQ ID NO: 498 - DNA, 23 bp, synthetic construct
  misc_feature 1..23: note = Description of Artificial Sequence: Synthetic primer
  source 1..23: mol_type = other DNA
aagcatgtccatcaccataaagg

SEQ ID NO: 499 - DNA, 30 bp, synthetic construct
  misc_feature 1..30: note = Description of Artificial Sequence: Synthetic primer
  source 1..30: mol_type = other DNA
aaacatggaaagagatgaataaagaaatgg

SEQ ID NO: 500 - DNA, 26 bp, synthetic construct
  misc_feature 1..26: note = Description of Artificial Sequence: Synthetic primer
  source 1..26: mol_type = other DNA
gagaagcatgtccatcaccataaagg

SEQ ID NO: 501 - DNA, 21 bp, synthetic construct
  misc_feature 1..21: note = Description of Artificial Sequence: Synthetic primer
  source 1..21: mol_type = other DNA
attcaaagaacaaccggaagc

SEQ ID NO: 502 - DNA, 21 bp, synthetic construct
  misc_feature 1..21: note = Description of Artificial Sequence: Synthetic primer
  source 1..21: mol_type = other DNA
aaaaatgagcatcccacaacg

SEQ ID NO: 503 - DNA, 27 bp, synthetic construct
  misc_feature 1..27: note = Description of Artificial Sequence: Synthetic primer
  source 1..27: mol_type = other DNA
aaagctatgggaaaagaatcaatgagc

SEQ ID NO: 504 - DNA, 24 bp, synthetic construct
  misc_feature 1..24: note = Description of Artificial Sequence: Synthetic primer
  source 1..24: mol_type = other DNA
ggagtttgaaatgaagagcagtgg

SEQ ID NO: 505 - DNA, 26 bp, synthetic construct
  misc_feature 1..26: note = Description of Artificial Sequence: Synthetic primer
  source 1..26: mol_type = other DNA
gaggcttcattctattcatttagggg

SEQ ID NO: 506 - DNA, 25 bp, synthetic construct
  misc_feature 1..25: note = Description of Artificial Sequence: Synthetic primer
  source 1..25: mol_type = other DNA
tcaacagatttagtttgacattgcc

SEQ ID NO: 507 - DNA, 23 bp, synthetic construct
  misc_feature 1..23: note = Description of Artificial Sequence: Synthetic primer
  source 1..23: mol_type = other DNA
tctaggttgacagaaaggctacc

SEQ ID NO: 508 - DNA, 24 bp, synthetic construct
  misc_feature 1..24: note = Description of Artificial Sequence: Synthetic primer
  source 1..24: mol_type = other DNA
gtccatgagtgttagcaagagacc

SEQ ID NO: 509 - DNA, 26 bp, synthetic construct
  misc_feature 1..26: note = Description of Artificial Sequence: Synthetic primer
  source 1..26: mol_type = other DNA
tataaatgaattggatcagctacccg

SEQ ID NO: 510 - DNA, 30 bp, synthetic construct
  misc_feature 1..30: note = Description of Artificial Sequence: Synthetic primer
  source 1..30: mol_type = other DNA
tataaaaagcaacaaacaatatcttcatgt

SEQ ID NO: 511 - DNA, 22 bp, synthetic construct
  misc_feature 1..22: note = Description of Artificial Sequence: Synthetic primer
  source 1..22: mol_type = other DNA
gttgggggatctgtgtaaatgc

SEQ ID NO: 512 - DNA, 25 bp, synthetic construct
  misc_feature 1..25: note = Description of Artificial Sequence: Synthetic primer
  source 1..25: mol_type = other DNA
agttggatattgaagcaagtgttcc

SEQ ID NO: 513 - DNA, 25 bp, synthetic construct
  misc_feature 1..25: note = Description of Artificial Sequence: Synthetic primer
  source 1..25: mol_type = other DNA
tgtgtaaatgctatatggaggaggc

SEQ ID NO: 514 - DNA, 24 bp, synthetic construct
  misc_feature 1..24: note = Description of Artificial Sequence: Synthetic primer
  source 1..24: mol_type = other DNA
tcgaaagacagttcctgagacacg

SEQ ID NO: 515 - DNA, 20 bp, synthetic construct
  misc_feature 1..20: note = Description of Artificial Sequence: Synthetic primer
  source 1..20: mol_type = other DNA
tgctacatgcgtgaaaaggg

SEQ ID NO: 516 - DNA, 19 bp, synthetic construct
  misc_feature 1..19: note = Description of Artificial Sequence: Synthetic primer
  source 1..19: mol_type = other DNA
agtaccaaagccatcaccc

SEQ ID NO: 517 - DNA, 27 bp, synthetic construct
  misc_feature 1..27: note = Description of Artificial Sequence: Synthetic primer
  source 1..27: mol_type = other DNA
ttaatatcatcatcactaccttgcatt

SEQ ID NO: 518 - DNA, 26 bp, synthetic construct
  misc_feature 1..26: note = Description of Artificial Sequence: Synthetic primer
  source 1..26: mol_type = other DNA
ggactaatagatgtttttggtgtgaa

SEQ ID NO: 519 - DNA, 28 bp, synthetic construct
  misc_feature 1..28: note = Description of Artificial Sequence: Synthetic primer
  source 1..28: mol_type = other DNA
caatgtactgtggtcaataatagtagcc

SEQ ID NO: 520 - DNA, 22 bp, synthetic construct
  misc_feature 1..22: note = Description of Artificial Sequence: Synthetic primer
  source 1..22: mol_type = other DNA
aatcgaaagaccaaatcggagg

SEQ ID NO: 521 - DNA, 24 bp, synthetic construct
  misc_feature 1..24: note = Description of Artificial Sequence: Synthetic primer
  source 1..24: mol_type = other DNA
ataagggagaatcctatacaaggc

SEQ ID NO: 522 - DNA, 22 bp, synthetic construct
  misc_feature 1..22: note = Description of Artificial Sequence: Synthetic primer
  source 1..22: mol_type = other DNA
cctaaattcgagagcaatgggg

SEQ ID NO: 523 - DNA, 22 bp, synthetic construct
  misc_feature 1..22: note = Description of Artificial Sequence: Synthetic primer
  source 1..22: mol_type = other DNA
agcatattggaggaagctaggg

SEQ ID NO: 524 - DNA, 21 bp, synthetic construct
  misc_feature 1..21: note = Description of Artificial Sequence: Synthetic primer
  source 1..21: mol_type = other DNA
tcgataaaccacttggcctcc

SEQ ID NO: 525 - DNA, 27 bp, synthetic construct
  misc_feature 1..27: note = Description of Artificial Sequence: Synthetic primer
  source 1..27: mol_type = other DNA
gatctaaaacatttgtctaggtggtgg

SEQ ID NO: 526 - DNA, 26 bp, synthetic construct
  misc_feature 1..26: note = Description of Artificial Sequence: Synthetic primer
  source 1..26: mol_type = other DNA
attctcctaaagtagctgaaatctgg

SEQ ID NO: 527 - DNA, 20 bp, synthetic construct
  misc_feature 1..20: note = Description of Artificial Sequence: Synthetic primer
  source 1..20: mol_type = other DNA
tcgtgttgttgagagatggg

SEQ ID NO: 528 - DNA, 30 bp, synthetic construct
  misc_feature 1..30: note = Description of Artificial Sequence: Synthetic primer
  source 1..30: mol_type = other DNA
aagtgtttttcttttaatacatctagtgcc

SEQ ID NO: 529 - DNA, 21 bp, synthetic construct
  misc_feature 1..21: note = Description of Artificial Sequence: Synthetic primer
  source 1..21: mol_type = other DNA
tggttggatttcagtaggagc

SEQ ID NO: 530 - DNA, 20 bp, synthetic construct
  misc_feature 1..20: note = Description of Artificial Sequence: Synthetic primer
  source 1..20: mol_type = other DNA
acgatcatggcagattgacg

SEQ ID NO: 531 - DNA, 26 bp, synthetic construct
  misc_feature 1..26: note = Description of Artificial Sequence: Synthetic primer
  source 1..26: mol_type = other DNA
cataacgtatctaaagaggaagctcg

SEQ ID NO: 532 - DNA, 25 bp, synthetic construct
  misc_feature 1..25: note = Description of Artificial Sequence: Synthetic primer
  source 1..25: mol_type = other DNA
tgcaaagtttttggcatcatcaacc

SEQ ID NO: 533 - DNA, 22 bp, synthetic construct
  misc_feature 1..22: note = Description of Artificial Sequence: Synthetic primer
  source 1..22: mol_type = other DNA
aaagatcaaccagcagcaatcg

SEQ ID NO: 534 - DNA, 23 bp, synthetic construct
  misc_feature 1..23: note = Description of Artificial Sequence: Synthetic primer
  source 1..23: mol_type = other DNA
gtgggtttgtagtttcctgatcg

SEQ ID NO: 535 - DNA, 26 bp, synthetic construct
  misc_feature 1..26: note = Description of Artificial Sequence: Synthetic primer
  source 1..26: mol_type = other DNA
aagctatgggaaaagaatcaatgagc

SEQ ID NO: 536 - DNA, 23 bp, synthetic construct
  misc_feature 1..23: note = Description of Artificial Sequence: Synthetic primer
  source 1..23: mol_type = other DNA
gagtttgaaatgaagagcagtgg

SEQ ID NO: 537 - DNA, 24 bp, synthetic construct
  misc_feature 1..24: note = Description of Artificial Sequence: Synthetic primer
  source 1..24: mol_type = other DNA
aggctgaaaatcctttagttaagc

SEQ ID NO: 538 - DNA, 24 bp, synthetic construct
  misc_feature 1..24: note = Description of Artificial Sequence: Synthetic primer
  source 1..24: mol_type = other DNA
ggactgaatccatattgtcgaagg

SEQ ID NO: 539 - DNA, 23 bp, synthetic construct
  misc_feature 1..23: note = Description of Artificial Sequence: Synthetic primer
  source 1..23: mol_type = other DNA
tgccttcaaaaacgagaaaaagg

SEQ ID NO: 540 - DNA, 25 bp, synthetic construct
  misc_feature 1..25: note = Description of Artificial Sequence: Synthetic primer
  source 1..25: mol_type = other DNA
agtctcttgcttcatctaatatggg

SEQ ID NO: 541 - DNA, 23 bp, synthetic construct
  misc_feature 1..23: note = Description of Artificial Sequence: Synthetic primer
  source 1..23: mol_type = other DNA
tgcagtggcattgaaatatgagg

SEQ ID NO: 542 - DNA, 22 bp, synthetic construct
  misc_feature 1..22: note = Description of Artificial Sequence: Synthetic primer
  source 1..22: mol_type = other DNA
gctgaagctcatctagtgtacc

SEQ ID NO: 543 - DNA, 25 bp, synthetic construct
  misc_feature 1..25: note = Description of Artificial Sequence: Synthetic primer
  source 1..25: mol_type = other DNA
ataaatgaactggatcagctacccg

SEQ ID NO: 544 - DNA, 30 bp, synthetic construct; identical to SEQ ID NO: 510
  misc_feature 1..30: note = Description of Artificial Sequence: Synthetic primer
  source 1..30: mol_type = other DNA

SEQ ID NO: 545 - DNA, 24 bp, synthetic construct
  misc_feature 1..24: note = Description of Artificial Sequence: Synthetic primer
  source 1..24: mol_type = other DNA
tgctatatggaggaggcaaaatgg

SEQ ID NO: 546 - DNA, 24 bp, synthetic construct
  misc_feature 1..24: note = Description of Artificial Sequence: Synthetic primer
  source 1..24: mol_type = other DNA
tcgaaaaacagttcctgagacacg

SEQ ID NO: 547 - DNA, 20 bp, synthetic construct
  misc_feature 1..20: note = Description of Artificial Sequence: Synthetic primer
  source 1..20: mol_type = other DNA
tgctacatgcgtgaaaaggg

SEQ ID NO: 548 - DNA, 22 bp, synthetic construct
  misc_feature 1..22: note = Description of Artificial Sequence: Synthetic primer
  source 1..22: mol_type = other DNA
tgtggtacatctccattgctcc

SEQ ID NO: 549 - DNA, 22 bp, synthetic construct
  misc_feature 1..22: note = Description of Artificial Sequence: Synthetic primer
  source 1..22: mol_type = other DNA
tggcttttcaccaatttgctcc

SEQ ID NO: 550 - DNA, 22 bp, synthetic construct
  misc_feature 1..22: note = Description of Artificial Sequence: Synthetic primer
  source 1..22: mol_type = other DNA
aaatgggaggtccatagttggc

SEQ ID NO: 551 - DNA, 25 bp, synthetic construct
  misc_feature 1..25: note = Description of Artificial Sequence: Synthetic primer
  source 1..25: mol_type = other DNA
ttgaagaaagaagtgacaagatggc

SEQ ID NO: 552 - DNA, 21 bp, synthetic construct
  misc_feature 1..21: note = Description of Artificial Sequence: Synthetic primer
  source 1..21: mol_type = other DNA
ggcgtagaagcctaaattcgc

SEQ ID NO: 553 - DNA, 24 bp, synthetic construct
  misc_feature 1..24: note = Description of Artificial Sequence: Synthetic primer
  source 1..24: mol_type = other DNA
acatggagaaaatggagaatgagg

SEQ ID NO: 554 - DNA, 20 bp, synthetic construct
  misc_feature 1..20: note = Description of Artificial Sequence: Synthetic primer
  source 1..20: mol_type = other DNA
cgcaacctcgaaacaagtcg

SEQ ID NO: 555 - DNA, 21 bp, synthetic construct
  misc_feature 1..21: note = Description of Artificial Sequence: Synthetic primer
  source 1..21: mol_type = other DNA
aggggattgtaaacttggtgg

SEQ ID NO: 556 - DNA, 28 bp, synthetic construct
  misc_feature 1..28: note = Description of Artificial Sequence: Synthetic primer
  source 1..28: mol_type = other DNA
ttctctaaaatagctgaaattctcctcg

SEQ ID NO: 557 - DNA, 27 bp, synthetic construct
  misc_feature 1..27: note = Description of Artificial Sequence: Synthetic primer
  source 1..27: mol_type = other DNA
tgagttaccagattacatgaagatgcc

SEQ ID NO: 558 - DNA, 24 bp, synthetic construct
  misc_feature 1..24: note = Description of Artificial Sequence: Synthetic primer
  source 1..24: mol_type = other DNA
actaatacatcgaaccccatctca

SEQ ID NO: 559 - DNA, 27 bp, synthetic construct
  misc_feature 1..27: note = Description of Artificial Sequence: Synthetic primer
  source 1..27: mol_type = other DNA
acaagaagcaaaatggtattatagtgg

SEQ ID NO: 560 - DNA, 30 bp, synthetic construct
  misc_feature 1..30: note = Description of Artificial Sequence: Synthetic primer
  source 1..30: mol_type = other DNA
ttttgttataggatttgtgaaacaataagc

SEQ ID NO: 561 - DNA, 22 bp, synthetic construct
  misc_feature 1..22: note = Description of Artificial Sequence: Synthetic primer
  source 1..22: mol_type = other DNA
ataatgctaccgaagacgaagc

SEQ ID NO: 562 - DNA, 22 bp, synthetic construct
  misc_feature 1..22: note = Description of Artificial Sequence: Synthetic primer
  source 1..22: mol_type = other DNA
tctgagaaccatgtccatctcc

SEQ ID NO: 563 - DNA, 26 bp, synthetic construct
  misc_feature 1..26: note = Description of Artificial Sequence: Synthetic primer
  source 1..26: mol_type = other DNA
aatcacttttgtagatttttcacacc

SEQ ID NO: 564 - DNA, 24 bp, synthetic construct
  misc_feature 1..24: note = Description of Artificial Sequence: Synthetic primer
  source 1..24: mol_type = other DNA
gtaatcgaaagaccaaatcggagg

SEQ ID NO: 565 - DNA, 24 bp, synthetic construct
  misc_feature 1..24: note = Description of Artificial Sequence: Synthetic primer
  source 1..24: mol_type = other DNA
agaaagaagtgacaagaatgctcc

SEQ ID NO: 566 - DNA, 20 bp, synthetic construct
  misc_feature 1..20: note = Description of Artificial Sequence: Synthetic primer
  source 1..20: mol_type = other DNA
agccatgttggcgtagaagc

SEQ ID NO: 567 - DNA, 22 bp, synthetic construct
  misc_feature 1..22: note = Description of Artificial Sequence: Synthetic primer
  source 1..22: mol_type = other DNA
tgctttcaaggataagagaggg

SEQ ID NO: 568 - DNA, 24 bp, synthetic construct
  misc_feature 1..24: note = Description of Artificial Sequence: Synthetic primer
  source 1..24: mol_type = other DNA
tcttcctcattctccattttctcc

SEQ ID NO: 569 - DNA, 27 bp, synthetic construct
  misc_feature 1..27: note = Description of Artificial Sequence: Synthetic primer
  source 1..27: mol_type = other DNA
aatacatggagaaaatggagaatgagg

SEQ ID NO: 570 - DNA, 20 bp, synthetic construct
  misc_feature 1..20: note = Description of Artificial Sequence: Synthetic primer
  source 1..20: mol_type = other DNA
cgcaaactcgaacaaagtcg

SEQ ID NO: 571 - DNA, 26 bp, synthetic construct
  misc_feature 1..26: note = Description of Artificial Sequence: Synthetic primer
  source 1..26: mol_type = other DNA
tttgctagagatagattgatggaagc

SEQ ID NO: 572 - DNA, 26 bp, synthetic construct
  misc_feature 1..26: note = Description of Artificial Sequence: Synthetic primer
  source 1..26: mol_type = other DNA
aaaagctctaattcctccaaagttcc

SEQ ID NO: 573 - DNA, 27 bp, synthetic construct
  misc_feature 1..27: note = Description of Artificial Sequence: Synthetic primer
  source 1..27: mol_type = other DNA
atcaatgagttaccagattacatgaag

SEQ ID NO: 574 - DNA, 25 bp, synthetic construct
  misc_feature 1..25: note = Description of Artificial Sequence: Synthetic primer
  source 1..25: mol_type = other DNA
actaatacatcgaaccccatctcat

SEQ ID NO: 575 - DNA, 20 bp, synthetic construct
  misc_feature 1..20: note = Description of Artificial Sequence: Synthetic primer
  source 1..20: mol_type = other DNA
atacactgagttgggttggc

SEQ ID NO: 576 - DNA, 23 bp, synthetic construct
  misc_feature 1..23: note = Description of Artificial Sequence: Synthetic primer
  source 1..23: mol_type = other DNA
tgttcctaaatcatctgcaagcc

SEQ ID NO: 577 - DNA, 23 bp, synthetic construct
  misc_feature 1..23: note = Description of Artificial Sequence: Synthetic primer
  source 1..23: mol_type = other DNA
gaattgaatagaggcgacgttcc

SEQ ID NO: 578 - DNA, 27 bp, synthetic construct
  misc_feature 1..27: note = Description of Artificial Sequence: Synthetic primer
  source 1..27: mol_type = other DNA
atagtgctgttctagccatatttttgc

SEQ ID NO: 579 - DNA, 28 bp, synthetic construct
  misc_feature 1..28: note = Description of Artificial Sequence: Synthetic primer
  source 1..28: mol_type = other DNA
caatgtactgtggtcaataatagtagcc

SEQ ID NO: 580 - DNA, 22 bp, synthetic construct
  misc_feature 1..22: note = Description of Artificial Sequence: Synthetic primer
  source 1..22: mol_type = other DNA
aatcgaaagaccaaatcggagg

SEQ ID NO: 581 - DNA, 23 bp, synthetic construct
  misc_feature 1..23: note = Description of Artificial Sequence: Synthetic primer
  source 1..23: mol_type = other DNA
actgtggtcaataatagtagccc

SEQ ID NO: 582 - DNA, 26 bp, synthetic construct
  misc_feature 1..26: note = Description of Artificial Sequence: Synthetic primer
  source 1..26: mol_type = other DNA
tgaatgtaatcgaaagaccaaatcgg

SEQ ID NO: 583 - DNA, 27 bp, synthetic construct
  misc_feature 1..27: note = Description of Artificial Sequence: Synthetic primer
  source 1..27: mol_type = other DNA
aatataagggagaatcctatacaaggc

SEQ ID NO: 584 - DNA, 22 bp, synthetic construct
  misc_feature 1..22: note = Description of Artificial Sequence: Synthetic primer
  source 1..22: mol_type = other DNA
atagccatgttggcgtagaagc

SEQ ID NO: 585 - DNA, 26 bp, synthetic construct
  misc_feature 1..26: note = Description of Artificial Sequence: Synthetic primer
  source 1..26: mol_type = other DNA
tgagaaaaatggtgaaagcatattgg

SEQ ID NO: 586 - DNA, 19 bp, synthetic construct
  misc_feature 1..19: note = Description of Artificial Sequence: Synthetic primer
  source 1..19: mol_type = other DNA
tccgttcttgcagtcctcc

SEQ ID NO: 587 - DNA, 20 bp, synthetic construct
  misc_feature 1..20: note = Description of Artificial Sequence: Synthetic primer
  source 1..20: mol_type = other DNA
gaggactgcaagaacggagg

SEQ ID NO: 588 - DNA, 26 bp, synthetic construct
  misc_feature 1..26: note = Description of Artificial Sequence: Synthetic primer
  source 1..26: mol_type = other DNA
acaaatgttttagatcgtcttgatgc

SEQ ID NO: 589 - DNA, 24 bp, synthetic construct
  misc_feature 1..24: note = Description of Artificial Sequence: Synthetic primer
  source 1..24: mol_type = other DNA
tttgtgagagataggttgatgggg

SEQ ID NO: 590 - DNA, 26 bp, synthetic construct
  misc_feature 1..26: note = Description of Artificial Sequence: Synthetic primer
  source 1..26: mol_type = other DNA
aaagctctaattcttctaatgttccg

SEQ ID NO: 591 - DNA, 22 bp, synthetic construct
  misc_feature 1..22: note = Description of Artificial Sequence: Synthetic primer
  source 1..22: mol_type = other DNA
atggttggatttcagtaggagc

SEQ ID NO: 592 - DNA, 22 bp, synthetic construct
  misc_feature 1..22: note = Description of Artificial Sequence: Synthetic primer
  source 1..22: mol_type = other DNA
gtacgatcatggcagattgacg

SEQ ID NO: 593 - DNA, 28 bp, synthetic construct
  misc_feature 1..28: note = Description of Artificial Sequence: Synthetic primer
  source 1..28: mol_type = other DNA
atgcaagaccataatgtatctaaagagg

SEQ ID NO: 594 - DNA, 25 bp, synthetic construct
  misc_feature 1..25: note = Description of Artificial Sequence: Synthetic primer
  source 1..25: mol_type = other DNA
tgcaaagtttttggcatcatcaacc

SEQ ID NO: 595 - DNA, 30 bp, synthetic construct
  misc_feature 1..30: note = Description of Artificial Sequence: Synthetic primer
  source 1..30: mol_type = other DNA
tcaatgtactgtagtcgatagttctaatcc

SEQ ID NO: 596 - DNA, 25 bp, synthetic construct
  misc_feature 1..25: note = Description of Artificial Sequence: Synthetic primer
  source 1..25: mol_type = other DNA
gaccaaatggatggttcatagttgc

SEQ ID NO: 597 - DNA, 23 bp, synthetic construct
  misc_feature 1..23: note = Description of Artificial Sequence: Synthetic primer
  source 1..23: mol_type = other DNA
tagaagtcgggtgaaagagatcg

SEQ ID NO: 598 - DNA, 25 bp, synthetic construct
  misc_feature 1..25: note = Description of Artificial Sequence: Synthetic primer
  source 1..25: mol_type = other DNA
agaagtctaaattcaagagcaatgg

SEQ ID NO: 599 - DNA, 24 bp, synthetic construct
  misc_feature 1..24: note = Description of Artificial Sequence: Synthetic primer
  source 1..24: mol_type = other DNA
atagaagtcgggtgaaagagatcg

SEQ ID NO: 600 - DNA, 27 bp, synthetic construct
  misc_feature 1..27: note = Description of Artificial Sequence: Synthetic primer
  source 1..27: mol_type = other DNA
aagcgataagatactccaagtctttgc

SEQ ID NO: 601 - DNA, 22 bp, synthetic construct
  misc_feature 1..22: note = Description of Artificial Sequence: Synthetic primer
  source 1..22: mol_type = other DNA
acgagacaggaaaattcaaggc

SEQ ID NO: 602 - DNA, 20 bp, synthetic construct
  misc_feature 1..20: note = Description of Artificial Sequence: Synthetic primer
  source 1..20: mol_type = other DNA
tcctccaatgaagtgggagc

SEQ ID NO: 603 - DNA, 22 bp, synthetic construct
  misc_feature 1..22: note = Description of Artificial Sequence: Synthetic primer
  source 1..22: mol_type = other DNA
gtggaggcatactaaacttggg

SEQ ID NO: 604 - DNA, 26 bp, synthetic construct
  misc_feature 1..26: note = Description of Artificial Sequence: Synthetic primer
  source 1..26: mol_type = other DNA
aaaagctctaattcatccaatgttcc

SEQ ID NO: 605 - DNA, 22 bp, synthetic construct
  misc_feature 1..22: note = Description of Artificial Sequence: Synthetic primer
  source 1..22: mol_type = other DNA
accagaatacatgaagatgcct

SEQ ID NO: 606 - DNA, 25 bp, synthetic construct
  misc_feature 1..25: note = Description of Artificial Sequence: Synthetic primer
  source 1..25: mol_type = other DNA
tgttgatggagatgtctttgtctct

SEQ ID NO: 607 - DNA, 27 bp, synthetic construct
  misc_feature 1..27: note = Description of Artificial Sequence: Synthetic primer
  source 1..27: mol_type = other DNA
gtggatagatatgtgtagaggttttct

SEQ ID NO: 608 - DNA, 20 bp, synthetic construct
  misc_feature 1..20: note = Description of Artificial Sequence: Synthetic primer
  source 1..20: mol_type = other DNA
aagaactggtgctcccactg

SEQ ID NO: 609 - DNA, 24 bp, synthetic construct
  misc_feature 1..24: note = Description of Artificial Sequence: Synthetic primer
  source 1..24: mol_type = other DNA
tgttcggatgaaatgaaaagaggc

SEQ ID NO: 610 - DNA, 25 bp, synthetic construct
  misc_feature 1..25: note = Description of Artificial Sequence: Synthetic primer
  source 1..25: mol_type = other DNA
tgtgacgctctaccaagatttttgc

SEQ ID NO: 611 - DNA, 24 bp, synthetic construct
  misc_feature 1..24: note = Description of Artificial Sequence: Synthetic primer
  source 1..24: mol_type = other DNA
caaatgttctgtggtccataaccc

SEQ ID NO: 612 - DNA, 26 bp, synthetic construct
  misc_feature 1..26: note = Description of Artificial Sequence: Synthetic primer
  source 1..26: mol_type = other DNA
gaccaaatgggaggttcatagtttcc

SEQ ID NO: 613 - DNA, 29 bp, synthetic construct
  misc_feature 1..29: note = Description of Artificial Sequence: Synthetic primer
  source 1..29: mol_type = other DNA
gagaaagatgtgaaaatgatgctacttgg

SEQ ID NO: 614 - DNA, 25 bp, synthetic construct
  misc_feature 1..25: note = Description of Artificial Sequence: Synthetic primer
  source 1..25: mol_type = other DNA
tgaggtactacaaatccatactccc

SEQ ID NO: 615 - DNA, 25 bp, synthetic construct
  misc_feature 1..25: note = Description of Artificial Sequence: Synthetic primer
  source 1..25: mol_type = other DNA
gatgatgaaacaggagagttcaagg

SEQ ID NO: 616 - DNA, 25 bp, synthetic construct
  misc_feature 1..25: note = Description of Artificial Sequence: Synthetic primer
  source 1..25: mol_type = other DNA
gacatttggttgtgaaaattcttgc

SEQ ID NO: 617 - DNA, 22 bp, synthetic construct
  misc_feature 1..22: note = Description of Artificial Sequence: Synthetic primer
  source 1..22: mol_type = other DNA
tggatcatgctttggaaatgcc

SEQ ID NO: 618 - DNA, 24 bp, synthetic construct
  misc_feature 1..24: note = Description of Artificial Sequence: Synthetic primer
  source 1..24: mol_type = other DNA
agctcttcttgatatgttgattgc

SEQ ID NO: 619 - DNA, 23 bp, synthetic construct
  misc_feature 1..23: note = Description of Artificial Sequence: Synthetic primer
  source 1..23: mol_type = other DNA
tggtggaagcattctaaacttgg

SEQ ID NO: 620 - DNA, 25 bp, synthetic construct
  misc_feature 1..25: note = Description of Artificial Sequence: Synthetic primer
  source 1..25: mol_type = other DNA
agcattagcgaagagttgtagttcc

SEQ ID NO: 621 - DNA, 22 bp, synthetic construct
  misc_feature 1..22: note = Description of Artificial Sequence: Synthetic primer
  source 1..22: mol_type = other DNA
agtgtttcatgtggcaagttgg

SEQ ID NO: 622 - DNA, 22 bp, synthetic construct
  misc_feature 1..22: note = Description of Artificial Sequence: Synthetic primer
  source 1..22: mol_type = other DNA
agcgaagagttgtagttcctcc

SEQ ID NO: 623 - DNA, 29 bp, synthetic construct
  misc_feature 1..29: note = Description of Artificial Sequence: Synthetic primer
  source 1..29: mol_type = other DNA
gggatttgaaagtaatagatgagttaccg

SEQ ID NO: 624 - DNA, 24 bp, synthetic construct
  misc_feature 1..24: note = Description of Artificial Sequence: Synthetic primer
  source 1..24: mol_type = other DNA
agaaagccatcttcatgtaatccg

SEQ ID NO: 625 - DNA, 22 bp, synthetic construct
  misc_feature 1..22: note = Description of Artificial Sequence: Synthetic primer
  source 1..22: mol_type = other DNA
agtggataccaaccaacattgc

SEQ ID NO: 626 - DNA, 30 bp, synthetic construct
  misc_feature 1..30: note = Description of Artificial Sequence: Synthetic primer
  source 1..30: mol_type = other DNA
tgttatgagatttgtaaaacagaaataagc

SEQ ID NO: 627 - DNA, 26 bp, synthetic construct
  misc_feature 1..26: note = Description of Artificial Sequence: Synthetic primer
  source 1..26: mol_type = other DNA
gatgaaatgaaaagaggcgatgttcc

SEQ ID NO: 628 - DNA, 22 bp, synthetic construct
  misc_feature 1..22: note = Description of Artificial Sequence: Synthetic primer
  source 1..22: mol_type = other DNA
tcaaatgcttgatgtgctcacg

SEQ ID NO: 629 - DNA, 26 bp, synthetic construct
  misc_feature 1..26: note = Description of Artificial Sequence: Synthetic primer
  source 1..26: mol_type = other DNA
tggaaggagatgaataatgaaaatgg

SEQ ID NO: 630 - DNA, 28 bp, synthetic construct
  misc_feature 1..28: note = Description of Artificial Sequence: Synthetic primer
  source 1..28: mol_type = other DNA
gatcttttgatagagtattttgagaagc

SEQ ID NO: 631 - DNA, 23 bp, synthetic construct
  misc_feature 1..23: note = Description of Artificial Sequence: Synthetic primer
  source 1..23: mol_type = other DNA
tcacttagaaccacaaaagaccc

SEQ ID NO: 632 - DNA, 22 bp, synthetic construct
  misc_feature 1..22: note = Description of Artificial Sequence: Synthetic primer
  source 1..22: mol_type = other DNA
gccaacaaataagccatgttgc

SEQ ID NO: 633 - DNA, 23 bp, synthetic construct
  misc_feature 1..23: note = Description of Artificial Sequence: Synthetic primer
  source 1..23: mol_type = other DNA
acagatttagaggcagagatggg

SEQ ID NO: 634 - DNA, 21 bp, synthetic construct
  misc_feature 1..21: note = Description of Artificial Sequence: Synthetic primer
  source 1..21: mol_type = other DNA
gtggtgaaactcttggcttcc

SEQ ID NO: 635 - DNA, 20 bp, synthetic construct
  misc_feature 1..20: note = Description of Artificial Sequence: Synthetic primer
  source 1..20: mol_type = other DNA
agcttcacaccttggaatgg

SEQ ID NO: 636 - DNA, 22 bp, synthetic construct
  misc_feature 1..22: note = Description of Artificial Sequence: Synthetic primer
  source 1..22: mol_type = other DNA
atccaacttagccaactcaagc

SEQ ID NO: 637 - DNA, 20 bp, synthetic construct
  misc_feature 1..20: note = Description of Artificial Sequence: Synthetic primer
  source 1..20: mol_type = other DNA
tgcaagagatcgtgtggtgg

SEQ ID NO: 638 - DNA, 24 bp, synthetic construct
  misc_feature 1..24: note = Description of Artificial Sequence: Synthetic primer
  source 1..24: mol_type = other DNA
actgcatttgtgaaaagttcaagc

SEQ ID NO: 639 - DNA, 22 bp, synthetic construct
  misc_feature 1..22: note = Description of Artificial Sequence: Synthetic primer
  source 1..22: mol_type = other DNA
tgggacataagggcaataaggg

SEQ ID NO: 640 - DNA, 27 bp, synthetic construct
  misc_feature 1..27: note = Description of Artificial Sequence: Synthetic primer
  source 1..27: mol_type = other DNA
cgatcacttcattaccaaaattaagca

SEQ ID NO: 641 - DNA, 20 bp, synthetic construct
  misc_feature 1..20: note = Description of Artificial Sequence: Synthetic primer
  source 1..20: mol_type = other DNA
tcagttggtggtcatgcagc

SEQ ID NO: 642 - DNA, 26 bp, synthetic construct
  misc_feature 1..26: note = Description of Artificial Sequence: Synthetic primer
  source 1..26: mol_type = other DNA
tgaagttcctaaatcatcactaagcc

SEQ ID NO: 643 - DNA, 20 bp, synthetic construct
  misc_feature 1..20: note = Description of Artificial Sequence: Synthetic primer
  source 1..20: mol_type = other DNA
tcagtggagtgctacatggc

SEQ ID NO: 644 - DNA, 21 bp, synthetic construct
  misc_feature 1..21: note = Description of Artificial Sequence: Synthetic primer
  source 1..21: mol_type = other DNA
tcaccattatttttggcaggc

SEQ ID NO: 645 - DNA, 30 bp, synthetic construct
  misc_feature 1..30: note = Description of Artificial Sequence: Synthetic primer
  source 1..30: mol_type = other DNA
acaaagagagttatgtgaagattattgagc

SEQ ID NO: 646 - DNA, 24 bp, synthetic construct
  misc_feature 1..24: note = Description of Artificial Sequence: Synthetic primer
  source 1..24: mol_type = other DNA
tcaagtgtctctaaagggttttcc

SEQ ID NO: 647 - DNA, 23 bp, synthetic construct
  misc_feature 1..23: note = Description of Artificial Sequence: Synthetic primer
  source 1..23: mol_type = other DNA
acttcatggtcttcatcctttgg

SEQ ID NO: 648 - DNA, 20 bp, synthetic construct
  misc_feature 1..20: note = Description of Artificial Sequence: Synthetic primer
  source 1..20: mol_type = other DNA
ttccctaagcaaccgaaagc

SEQ ID NO: 649 - DNA, 20 bp, synthetic construct
  misc_feature 1..20: note = Description of Artificial Sequence: Synthetic primer
  source 1..20: mol_type = other DNA
gccctaatgcaccctattcg

SEQ ID NO: 650 - DNA, 28 bp, synthetic construct
  misc_feature 1..28: note = Description of Artificial Sequence: Synthetic primer
  source 1..28: mol_type = other DNA
taattctttttgatgtagttgttgaagc

SEQ ID NO: 651 - DNA, 24 bp, synthetic construct
  misc_feature 1..24: note = Description of Artificial Sequence: Synthetic primer
  source 1..24: mol_type = other DNA
tgatgaccaagttgatttctttgc

SEQ ID NO: 652 - DNA, 24 bp, synthetic construct
  misc_feature 1..24: note = Description of Artificial Sequence: Synthetic primer
  source 1..24: mol_type = other DNA
tttctaactgcttcagtaaaaggc

SEQ ID NO: 653 - DNA, 29 bp, synthetic construct
  misc_feature 1..29: note = Description of Artificial Sequence: Synthetic primer
  source 1..29: mol_type = other DNA
actagagtacatgaaagtatgttacaaga

SEQ ID NO: 654 - DNA, 21 bp, synthetic construct
  misc_feature 1..21: note = Description of Artificial Sequence: Synthetic primer
  source 1..21: mol_type = other DNA
acatagctcgcacagtatgga

SEQ ID NO: 655 - DNA, 21 bp, synthetic construct
  misc_feature 1..21: note = Description of Artificial Sequence: Synthetic primer
  source 1..21: mol_type = other DNA
aggaagcccaatggttacaca

SEQ ID NO: 656 - DNA, 25 bp, synthetic construct
  misc_feature 1..25: note = Description of Artificial Sequence: Synthetic primer
  source 1..25: mol_type = other DNA
agttcgtataatcttaggttggggt

SEQ ID NO: 657 - DNA, 19 bp, synthetic construct
  misc_feature 1..19: note = Description of Artificial Sequence: Synthetic primer
  source 1..19: mol_type = other DNA
gtagtggcttccgctgtgg

SEQ ID NO: 658 - DNA, 24 bp, synthetic construct
  misc_feature 1..24: note = Description of Artificial Sequence: Synthetic primer
  source 1..24: mol_type = other DNA
tcgccttctctatacatctcatgg

SEQ ID NO: 659 - DNA, 24 bp, synthetic construct
  misc_feature 1..24: note = Description of Artificial Sequence: Synthetic primer
  source 1..24: mol_type = other DNA
tggtcttcatcctttggaaaaccc

SEQ ID NO: 660 - DNA, 21 bp, synthetic construct
  misc_feature 1..21: note = Description of Artificial Sequence: Synthetic primer
  source 1..21: mol_type = other DNA
ttccctaagcaaccgaaagcg

SEQ ID NO: 661 - DNA, 22 bp, synthetic construct
  misc_feature 1..22: note = Description of Artificial Sequence: Synthetic primer
  source 1..22: mol_type = other DNA
gtgaaacatgccctaatgcacc

SEQ ID NO: 662 - DNA, 25 bp, synthetic construct
  misc_feature 1..25: note = Description of Artificial Sequence: Synthetic primer
  source 1..25: mol_type = other DNA
atctagtttggcagttaaaagaagc

SEQ ID NO: 663 - DNA, 26 bp, synthetic construct
  misc_feature 1..26: note = Description of Artificial Sequence: Synthetic primer
  source 1..26: mol_type = other DNA
acagaatagtggagtgttacatttgg

SEQ ID NO: 664 - DNA, 28 bp, synthetic construct
  misc_feature 1..28: note = Description of Artificial Sequence: Synthetic primer
  source 1..28: mol_type = other DNA
ataatagtaagcaaagaaatcaacttgg

SEQ ID NO: 665 - DNA, 23 bp, synthetic construct
  misc_feature 1..23: note = Description of Artificial Sequence: Synthetic primer
  source 1..23: mol_type = other DNA
ttcaaaactcccaaaaagcgaaa

SEQ ID NO: 666 - DNA, 21 bp, synthetic construct
  misc_feature 1..21: note = Description of Artificial Sequence: Synthetic primer
  source 1..21: mol_type = other DNA
tgtcacgtcagcatacactcc

SEQ ID NO: 667 - DNA, 23 bp, synthetic construct
  misc_feature 1..23: note = Description of Artificial Sequence: Synthetic primer
  source 1..23: mol_type = other DNA
tcaaaagatgtagtggcttctgc

SEQ ID NO: 668 - DNA, 24 bp, synthetic construct
  misc_feature 1..24: note = Description of Artificial Sequence: Synthetic primer
  source 1..24: mol_type = other DNA
attaagagtggtctaggaatagcg

SEQ ID NO: 669 - DNA, 26 bp, synthetic construct
  misc_feature 1..26: note = Description of Artificial Sequence: Synthetic primer
  source 1..26: mol_type = other DNA
caatatggtgtaacagatgaagaagc

SEQ ID NO: 670 - DNA, 26 bp, synthetic construct
  misc_feature 1..26: note = Description of Artificial Sequence: Synthetic primer
  source 1..26: mol_type = other DNA
tgagagtatcaatcaaattcttgagc

SEQ ID NO: 671 - DNA, 23 bp, synthetic construct
  misc_feature 1..23: note = Description of Artificial Sequence: Synthetic primer
  source 1..23: mol_type = other DNA
catcgagacaaactgcgaatact

SEQ ID NO: 672 - DNA, 27 bp, synthetic construct
  misc_feature 1..27: note = Description of Artificial Sequence: Synthetic primer
  source 1..27: mol_type = other DNA
atatgtgatctccattttcttccattg

SEQ ID NO: 673 - DNA, 19 bp, synthetic construct
  misc_feature 1..19: note = Description of Artificial Sequence: Synthetic primer
  source 1..19: mol_type = other DNA
catggatggcccgattgga

SEQ ID NO: 674 - DNA, 25 bp, synthetic construct
  misc_feature 1..25: note = Description of Artificial Sequence: Synthetic primer
  source 1..25: mol_type = other DNA
tcgaaaatgattctttccaagccat

SEQ ID NO: 675 - DNA, 23 bp, synthetic construct
  misc_feature 1..23: note = Description of Artificial Sequence: Synthetic primer
  source 1..23: mol_type = other DNA
gattggggacttagtgaaatggg

SEQ ID NO: 676 - DNA, 28 bp, synthetic construct
  misc_feature 1..28: note = Description of Artificial Sequence: Synthetic primer
  source 1..28: mol_type = other DNA
gtaaagttttctaactcggtgattaagg

SEQ ID NO: 677 - DNA, 21 bp, synthetic construct
  misc_feature 1..21: note = Description of Artificial Sequence: Synthetic primer
  source 1..21: mol_type = other DNA
ggtgggatggtgaaggattga

SEQ ID NO: 678 - DNA, 24 bp, synthetic construct
  misc_feature 1..24: note = Description of Artificial Sequence: Synthetic primer
  source 1..24: mol_type = other DNA
tgatgtcacttgtttcttgttgat

SEQ ID NO: 679 - DNA, 21 bp, synthetic construct
  misc_feature 1..21: note = Description of Artificial Sequence: Synthetic primer
  source 1..21: mol_type = other DNA
tcacaccttgcttcttccagc

SEQ ID NO: 680 - DNA, 30 bp, synthetic construct
  misc_feature 1..30: note = Description of Artificial Sequence: Synthetic primer
  source 1..30: mol_type = other DNA
tcattcaacaaacgacaaataatcataacc

SEQ ID NO: 681 - DNA, 21 bp, synthetic construct
  misc_feature 1..21: note = Description of Artificial Sequence: Synthetic primer
  source 1..21: mol_type = other DNA
acttgaagaacaatcccgagg

SEQ ID NO: 682 - DNA, 22 bp, synthetic construct
  misc_feature 1..22: note = Description of Artificial Sequence: Synthetic primer
  source 1..22: mol_type = other DNA
aaccctaacatcatcatcgtcg

SEQ ID NO: 683 - DNA, 21 bp, synthetic construct
  misc_feature 1..21: note = Description of Artificial Sequence: Synthetic primer
  source 1..21: mol_type = other DNA
cagacactgaaatgcttgacg

SEQ ID NO: 684 - DNA, 22 bp, synthetic construct
  misc_feature 1..22: note = Description of Artificial Sequence: Synthetic primer
  source 1..22: mol_type = other DNA
tagcggttagacatttagaggg

SEQ ID NO: 685 - DNA, 23 bp, synthetic construct
  misc_feature 1..23: note = Description of Artificial Sequence: Synthetic primer
  source 1..23: mol_type = other DNA
caaccctctaaatgtctaaccgc

SEQ ID NO: 686 - DNA, 26 bp, synthetic construct
  misc_feature 1..26: note = Description of Artificial Sequence: Synthetic primer
  source 1..26: mol_type = other DNA
aaattgagttttgaaggcatagtagg

SEQ ID NO: 687 - DNA, 20 bp, synthetic construct
  misc_feature 1..20: note = Description of Artificial Sequence: Synthetic primer
  source 1..20: mol_type = other DNA
atctttgccccaaactcagg

SEQ ID NO: 688 - DNA, 22 bp, synthetic construct
  misc_feature 1..22: note = Description of Artificial Sequence: Synthetic primer
  source 1..22: mol_type = other DNA
ggttaggatgtggtatcatggc

SEQ ID NO: 689 - DNA, 23 bp, synthetic construct
  misc_feature 1..23: note = Description of Artificial Sequence: Synthetic primer
  source 1..23: mol_type = other DNA
taccacatcctaaccaaccttcg

SEQ ID NO: 690 - DNA, 21 bp, synthetic construct
  misc_feature 1..21: note = Description of Artificial Sequence: Synthetic primer
  source 1..21: mol_type = other DNA
caacaacacaagccagagtgg

SEQ ID NO: 691 - DNA, 26 bp, synthetic construct
  misc_feature 1..26: note = Description of Artificial Sequence: Synthetic primer
  source 1..26: mol_type = other DNA
tattcattcatctaatgcaaaaaggc

SEQ ID NO: 692 - DNA, 22 bp, synthetic construct
  misc_feature 1..22: note = Description of Artificial Sequence: Synthetic primer
  source 1..22: mol_type = other DNA
aatatgtccgaaacgaaaacgg

SEQ ID NO: 693 - DNA, 25 bp, synthetic construct
  misc_feature 1..25: note = Description of Artificial Sequence: Synthetic primer
  source 1..25: mol_type = other DNA
tgttatcatatcttgaagtgttgcc

SEQ ID NO: 694 - DNA, 20 bp, synthetic construct
  misc_feature 1..20: note = Description of Artificial Sequence: Synthetic primer
  source 1..20: mol_type = other DNA
ctgttgccgatggagattgg

SEQ ID NO: 695 - DNA, 20 bp, synthetic construct
  misc_feature 1..20: note = Description of Artificial Sequence: Synthetic primer
  source 1..20: mol_type = other DNA
caatctccatcggcaacagc

SEQ ID NO: 696 - DNA, 29 bp, synthetic construct
  misc_feature 1..29: note = Description of Artificial Sequence: Synthetic primer
  source 1..29: mol_type = other DNA
tgttattattggaaaacttgtgaactagg

SEQ ID NO: 697 - DNA, 21 bp, synthetic construct
  misc_feature 1..21: note = Description of Artificial Sequence: Synthetic primer
  source 1..21: mol_type = other DNA
agggttagctgagcatttcgc

SEQ ID NO: 698 - DNA, 24 bp, synthetic construct
  misc_feature 1..24: note = Description of Artificial Sequence: Synthetic primer
  source 1..24: mol_type = other DNA
ctaggaaaaactttgtagccatgc

SEQ ID NO: 699 - DNA, 23 bp, synthetic construct
  misc_feature 1..23: note = Description of Artificial Sequence: Synthetic primer
  source 1..23: mol_type = other DNA
actatgaatgcttttcggttacg

SEQ ID NO: 700 - DNA, 28 bp, synthetic construct
  misc_feature 1..28: note = Description of Artificial Sequence: Synthetic primer
  source 1..28: mol_type = other DNA
aaaatagacttttgaagtagttttctcg

SEQ ID NO: 701 - DNA, 24 bp, synthetic construct
  misc_feature 1..24: note = Description of Artificial Sequence: Synthetic primer
  source 1..24: mol_type = other DNA
ttgcttttcatggtgaatttgagc

SEQ ID NO: 702 - DNA, 27 bp, synthetic construct
  misc_feature 1..27: note = Description of Artificial Sequence: Synthetic primer
  source 1..27: mol_type = other DNA
tttgttaaaaggatttgtatgtggagc

SEQ ID NO: 703 - DNA, 21 bp, synthetic construct
  misc_feature 1..21: note = Description of Artificial Sequence: Synthetic primer
  source 1..21: mol_type = other DNA
tggctcgactagatcacttgg

SEQ ID NO: 704 - DNA, 22 bp, synthetic construct
  misc_feature 1..22: note = Description of Artificial Sequence: Synthetic primer
  source 1..22: mol_type = other DNA
gtgaaacctcgacaacctttgg

SEQ ID NO: 705 - DNA, 25 bp, synthetic construct
  misc_feature 1..25: note = Description of Artificial Sequence: Synthetic primer
  source 1..25: mol_type = other DNA
ggggacttaatgaaatgggatttgg

SEQ ID NO: 706 - DNA, 23 bp, synthetic construct
  misc_feature 1..23: note = Description of Artificial Sequence: Synthetic primer
  source 1..23: mol_type = other DNA
tcataaggcaaagaacaacaagc

SEQ ID NO: 707 - DNA, 21 bp, synthetic construct
  misc_feature 1..21: note = Description of Artificial Sequence: Synthetic primer
  source 1..21: mol_type = other DNA
ccatagcaactcacaccttgc

SEQ ID NO: 708 - DNA, 23 bp, synthetic construct
  misc_feature 1..23: note = Description of Artificial Sequence: Synthetic primer
  source 1..23: mol_type = other DNA
acactctcacattgaattggtcg

SEQ ID NO: 709 - DNA, 25 bp, synthetic construct
  misc_feature 1..25: note = Description of Artificial Sequence: Synthetic primer
  source 1..25: mol_type = other DNA
cttgcttttcatggtgaatttgagc

SEQ ID NO: 710 - DNA, 30 bp, synthetic construct
  misc_feature 1..30: note = Description of Artificial Sequence: Synthetic primer
  source 1..30: mol_type = other DNA
cagtttcttaaagggatttgtatgttgagc

SEQ ID NO: 711 - DNA, 20 bp, synthetic construct
  misc_feature 1..20: note = Description of Artificial Sequence: Synthetic primer
  source 1..20: mol_type = other DNA
gatggctcgactagatcacc

SEQ ID NO: 712 - DNA, 24 bp, synthetic construct
  misc_feature 1..24: note = Description of Artificial Sequence: Synthetic primer
  source 1..24: mol_type = other DNA
agatgtctttcccatccataaagc

SEQ ID NO: 713 - DNA, 24 bp, synthetic construct
  misc_feature 1..24: note = Description of Artificial Sequence: Synthetic primer
  source 1..24: mol_type = other DNA
agaatggggacttagtgaaatggg

SEQ ID NO: 714 - DNA, 26 bp, synthetic construct
  misc_feature 1..26: note = Description of Artificial Sequence: Synthetic primer
  source 1..26: mol_type = other DNA
tggagaatcataaggcaaataacagc

SEQ ID NO: 715 - DNA, 24 bp, synthetic construct
  misc_feature 1..24: note = Description of Artificial Sequence: Synthetic primer
  source 1..24: mol_type = other DNA
tggaataatgaagggttgagtggt

SEQ ID NO: 716 - DNA, 25 bp, synthetic construct
  misc_feature 1..25: note = Description of Artificial Sequence: Synthetic primer
  source 1..25: mol_type = other DNA
tcttatgtagctggttatgtcttca

SEQ ID NO: 717 - DNA, 24 bp, synthetic construct
  misc_feature 1..24: note = Description of Artificial Sequence: Synthetic primer
  source 1..24: mol_type = other DNA
tgaatctgagtggagtaaaagtgg

SEQ ID NO: 718 - DNA, 24 bp, synthetic construct
  misc_feature 1..24: note = Description of Artificial Sequence: Synthetic primer
  source 1..24: mol_type = other DNA
agaagaaatgaagctggaagaagc

SEQ ID NO: 719 - DNA, 23 bp, synthetic construct
  misc_feature 1..23: note = Description of Artificial Sequence: Synthetic primer
  source 1..23: mol_type = other DNA
gcaactcataccttgcttcttcc

SEQ ID NO: 720 - DNA, 26 bp, synthetic construct
  misc_feature 1..26: note = Description of Artificial Sequence: Synthetic primer
  source 1..26: mol_type = other DNA
gaactttgtaagtcattcaacaaacg

SEQ ID NO: 721 - DNA, 24 bp, synthetic construct
  misc_feature 1..24: note = Description of Artificial Sequence: Synthetic primer
  source 1..24: mol_type = other DNA
gagggaaagagaagaaggcaaacc

SEQ ID NO: 722 - DNA, 28 bp, synthetic construct
  misc_feature 1..28: note = Description of Artificial Sequence: Synthetic primer
  source 1..28: mol_type = other DNA
acttttaagcaagataagtgtagaagcc

SEQ ID NO: 723 - DNA, 26 bp, synthetic construct
  misc_feature 1..26: note = Description of Artificial Sequence: Synthetic primer
  source 1..26: mol_type = other DNA
aatgacaatggttttaccaatcttcc

SEQ ID NO: 724 - DNA, 25 bp, synthetic construct
  misc_feature 1..25: note = Description of Artificial Sequence: Synthetic primer
  source 1..25: mol_type = other DNA
aatcgctttgttaatgtcttcaagc

SEQ ID NO: 725 - DNA, 21 bp, synthetic construct
  misc_feature 1..21: note = Description of Artificial Sequence: Synthetic primer
  source 1..21: mol_type = other DNA
tcggccaattttcatcctagt

SEQ ID NO: 726 - DNA, 26 bp, synthetic construct
  misc_feature 1..26: note = Description of Artificial Sequence: Synthetic primer
  source 1..26: mol_type = other DNA
ggtatatttgagaaagtgatctcccc

SEQ ID NO: 727 - DNA, 19 bp, synthetic construct
  misc_feature 1..19: note = Description of Artificial Sequence: Synthetic primer
  source 1..19: mol_type = other DNA
ggatgctaactgctgcccc

SEQ ID NO: 728 - DNA, 21 bp, synthetic construct
  misc_feature 1..21: note = Description of Artificial Sequence: Synthetic primer
  source 1..21: mol_type = other DNA
aaagggagaccgtatgaaggg

SEQ ID NO: 729 - DNA, 22 bp, synthetic construct
  misc_feature 1..22: note = Description of Artificial Sequence: Synthetic primer
  source 1..22: mol_type = other DNA
gaaatcccagttgaccatgagc

SEQ ID NO: 730 - DNA, 20 bp, synthetic construct
  misc_feature 1..20: note = Description of Artificial Sequence: Synthetic primer
  source 1..20: mol_type = other DNA
gatgactgtggttagggtcg

SEQ ID NO: 731 - DNA, 21 bp, synthetic construct
  misc_feature 1..21: note = Description of Artificial Sequence: Synthetic primer
  source 1..21: mol_type = other DNA
cacaactcatttggtggaggc

SEQ ID NO: 732 - DNA, 21 bp, synthetic construct
  misc_feature 1..21: note = Description of Artificial Sequence: Synthetic primer
  source 1..21: mol_type = other DNA
agatgactgtggttagggtcg

SEQ ID NO: 733 - DNA, 23 bp, synthetic construct
  misc_feature 1..23: note = Description of Artificial Sequence: Synthetic primer
  source 1..23: mol_type = other DNA
ggaaagacttggactttgcatcg

SEQ ID NO: 734 - DNA, 21 bp, synthetic construct
  misc_feature 1..21: note = Description of Artificial Sequence: Synthetic primer
  source 1..21: mol_type = other DNA
ctagcagcactgtactttggc

SEQ ID NO: 735 - DNA, 23 bp, synthetic construct
  misc_feature 1..23: note = Description of Artificial Sequence: Synthetic primer
  source 1..23: mol_type = other DNA
ggaaagacttggactttgcatcg

SEQ ID NO: 736 - DNA, 20 bp, synthetic construct
  misc_feature 1..20: note = Description of Artificial Sequence: Synthetic primer
  source 1..20: mol_type = other DNA
ttgcgtctgtgaagagttcc

SEQ ID NO: 737 - DNA, 28 bp, synthetic construct
  misc_feature 1..28: note = Description of Artificial Sequence: Synthetic primer
  source 1..28: mol_type = other DNA
tatacgatgaaattgaggaggagttggc

SEQ ID NO: 738 - DNA, 22 bp, synthetic construct
  misc_feature 1..22: note = Description of Artificial Sequence: Synthetic primer
  source 1..22: mol_type = other DNA
aggccatccgataagttctgcc

SEQ ID NO: 739 - DNA, 21 bp, synthetic construct
  misc_feature 1..21: note = Description of Artificial Sequence: Synthetic primer
  source 1..21: mol_type = other DNA
tactacgtggaagctcaatgg

SEQ ID NO: 740 - DNA, 21 bp, synthetic construct
  misc_feature 1..21: note = Description of Artificial Sequence: Synthetic primer
  source 1..21: mol_type = other DNA
aagccaatgaaagacctcagc

SEQ ID NO: 741 - DNA, 20 bp, synthetic construct
  misc_feature 1..20: note = Description of Artificial Sequence: Synthetic primer
  source 1..20: mol_type = other DNA
actacatgctcactgccacg

SEQ ID NO: 742 - DNA, 21 bp, synthetic construct
  misc_feature 1..21: note = Description of Artificial Sequence: Synthetic primer
  source 1..21: mol_type = other DNA
tctgcaaactactgctgatgc

SEQ ID NO: 743 - DNA, 23 bp, synthetic construct
  misc_feature 1..23: note = Description of Artificial Sequence: Synthetic primer
  source 1..23: mol_type = other DNA
gtttgagcaagatagaggacacg

SEQ ID NO: 744 - DNA, 20 bp, synthetic construct
  misc_feature 1..20: note = Description of Artificial Sequence: Synthetic primer
  source 1..20: mol_type = other DNA
gcatgaggacagacatgggc

SEQ ID NO: 745 - DNA, 21 bp, synthetic construct
  misc_feature 1..21: note = Description of Artificial Sequence: Synthetic primer
  source 1..21: mol_type = other DNA
tgaatgaggagtgcatggagc

SEQ ID NO: 746 - DNA, 19 bp, synthetic construct
  misc_feature 1..19: note = Description of Artificial Sequence: Synthetic primer
  source 1..19: mol_type = other DNA
tccggcatgggtgtaaccg

SEQ ID NO: 747 - DNA, 24 bp, synthetic construct
  misc_feature 1..24: note = Description of Artificial Sequence: Synthetic primer
  source 1..24: mol_type = other DNA
agcctcatcacaaaatgacaaagt

SEQ ID NO: 748 - DNA, 24 bp, synthetic construct
  misc_feature 1..24: note = Description of Artificial Sequence: Synthetic primer
  source 1..24: mol_type = other DNA
ggttgataagttgttgttggacga

SEQ ID NO: 749 - DNA, 22 bp, synthetic construct
  misc_feature 1..22: note = Description of Artificial Sequence: Synthetic primer
  source 1..22: mol_type = other DNA
aaggaagtggtaaggagagagg

SEQ ID NO: 750 - DNA, 23 bp, synthetic construct
  misc_feature 1..23: note = Description of Artificial Sequence: Synthetic primer
  source 1..23: mol_type = other DNA
gaaaccataaatccatgttggcg

SEQ ID NO: 751 - DNA, 23 bp, synthetic construct
  misc_feature 1..23: note = Description of Artificial Sequence: Synthetic primer
  source 1..23: mol_type = other DNA
agcaagggaattttaaggagtgc

SEQ ID NO: 752 - DNA, 20 bp, synthetic construct
  misc_feature 1..20: note = Description of Artificial Sequence: Synthetic primer
  source 1..20: mol_type = other DNA
aggtgagtggtggtgaaagc

SEQ ID NO: 753 - DNA, 21 bp, synthetic construct
  misc_feature 1..21: note = Description of Artificial Sequence: Synthetic primer
  source 1..21: mol_type = other DNA
ttgctttcaccaccactcacc

SEQ ID NO: 754 - DNA, 21 bp, synthetic construct
  misc_feature 1..21: note = Description of Artificial Sequence: Synthetic primer
  source 1..21: mol_type = other DNA
gaaatgtaatgcctggcgtgg

SEQ ID NO: 755 - DNA, 23 bp, synthetic construct
  misc_feature 1..23: note = Description of Artificial Sequence: Synthetic primer
  source 1..23: mol_type = other DNA
tgcaagagataggattgtggagc

SEQ ID NO: 756 - DNA, 20 bp, synthetic construct
  misc_feature 1..20: note = Description of Artificial Sequence: Synthetic primer
  source 1..20: mol_type = other DNA
tctgcaactgaggccaatgc

SEQ ID NO: 757 - DNA, 21 bp, synthetic construct
  misc_feature 1..21: note = Description of Artificial Sequence: Synthetic primer
  source 1..21: mol_type = other DNA
tgaacctgaattgtcactggc

SEQ ID NO: 758 - DNA, 22 bp, synthetic construct
  misc_feature 1..22: note = Description of Artificial Sequence: Synthetic primer
  source 1..22: mol_type = other DNA
gctcaagctcttcaaatgtacc

SEQ ID NO: 759 - DNA, 20 bp, synthetic construct
  misc_feature 1..20: note = Description of Artificial Sequence: Synthetic primer
  source 1..20: mol_type = other DNA
aattgtgcggatcaacttcg

SEQ ID NO: 760 - DNA, 23 bp, synthetic construct
  misc_feature 1..23: note = Description of Artificial Sequence: Synthetic primer
  source 1..23: mol_type = other DNA
tgtaactttcctcctttccaagc

SEQ ID NO: 761 - DNA, 24 bp, synthetic construct
  misc_feature 1..24: note = Description of Artificial Sequence: Synthetic primer
  source 1..24: mol_type = other DNA
agcgatgaaaagattacttggagc

SEQ ID NO: 762 - DNA, 27 bp, synthetic construct
  misc_feature 1..27: note = Description of Artificial Sequence: Synthetic primer
  source 1..27: mol_type = other DNA
catccatgaacctacaaaggatattgc

SEQ ID NO: 763 - DNA, 22 bp, synthetic construct
  misc_feature 1..22: note = Description of Artificial Sequence: Synthetic primer
  source 1..22: mol_type = other DNA
agagatcattcaccgtctaccg

SEQ ID NO: 764 - DNA, 26 bp, synthetic construct
  misc_feature 1..26: note = Description of Artificial Sequence: Synthetic primer
  source 1..26: mol_type = other DNA
aaactggataaggcacattagaaggc

SEQ ID NO: 765 - DNA, 22 bp, synthetic construct
  misc_feature 1..22: note = Description of Artificial Sequence: Synthetic primer
  source 1..22: mol_type = other DNA
ggccttctaatgtgccttatcc

SEQ ID NO: 766 - DNA, 27 bp, synthetic construct
  misc_feature 1..27: note = Description of Artificial Sequence: Synthetic primer
  source 1..27: mol_type = other DNA
tcatgggatttgatctataagtaacgc

SEQ ID NO: 767 - DNA, 26 bp, synthetic construct
  misc_feature 1..26: note = Description of Artificial Sequence: Synthetic primer
  source 1..26: mol_type = other DNA
agttttagcctcatcacaaaatgaca

SEQ ID NO: 768 - DNA, 24 bp, synthetic construct
  misc_feature 1..24: note = Description of Artificial Sequence: Synthetic primer
  source 1..24: mol_type = other DNA
gttgataagttgttgttggacgaa

SEQ ID NO: 769 - DNA, 24 bp, synthetic construct
  misc_feature 1..24: note = Description of Artificial Sequence: Synthetic primer
  source 1..24: mol_type = other DNA
tagcctcatcacaaaatgacaaag

SEQ ID NO: 770 - DNA, 24 bp, synthetic construct
  misc_feature 1..24: note = Description of Artificial Sequence: Synthetic primer
  source 1..24: mol_type = other DNA
cccccaaatagaaggttgataagt

SEQ ID NO: 771 - DNA, 20 bp, synthetic construct
  misc_feature 1..20: note = Description of Artificial Sequence: Synthetic primer
  source 1..20: mol_type = other DNA
taaaaagcagcgagttgacg

SEQ ID NO: 772 - DNA, 22 bp, synthetic construct
  misc_feature 1..22: note = Description of Artificial Sequence: Synthetic primer
  source 1..22: mol_type = other DNA
aatgatacgacaatcccaaacg

SEQ ID NO: 773 - DNA, 22 bp, synthetic construct
  misc_feature 1..22: note = Description of Artificial Sequence: Synthetic primer
  source 1..22: mol_type = other DNA
aaggaagtggtaaggagagagg

SEQ ID NO: 774 - DNA, 23 bp, synthetic construct
  misc_feature 1..23: note = Description of Artificial Sequence: Synthetic primer
  source 1..23: mol_type = other DNA
gaaaccataaatccatgttggcg

SEQ ID NO: 775 - DNA, 23 bp, synthetic construct
  misc_feature 1..23: note = Description of Artificial Sequence: Synthetic primer
  source 1..23: mol_type = other DNA
agcaagggaattttaaggagtgc

SEQ ID NO: 776 - DNA, 20 bp, synthetic construct
  misc_feature 1..20: note = Description of Artificial Sequence: Synthetic primer
  source 1..20: mol_type = other DNA
aggtgagtggtggtgaaagc

SEQ ID NO: 777 - DNA, 22 bp, synthetic construct
  misc_feature 1..22: note = Description of Artificial Sequence: Synthetic primer
  source 1..22: mol_type = other DNA
cttgctttcaccaccactcacc

SEQ ID NO: 778 - DNA, 19 bp, synthetic construct
  misc_feature 1..19: note = Description of Artificial Sequence: Synthetic primer
  source 1..19: mol_type = other DNA
gtaatgcctggcgtggagc

SEQ ID NO: 779 - DNA, 22 bp, synthetic construct
  misc_feature 1..22: note = Description of Artificial Sequence: Synthetic primer
  source 1..22: mol_type = other DNA
gcaagagataggattgtggagc

SEQ ID NO: 780 - DNA, 20 bp, synthetic construct
  misc_feature 1..20: note = Description of Artificial Sequence: Synthetic primer
  source 1..20: mol_type = other DNA
atctgcaactgaggccaagg

SEQ ID NO: 781 - DNA, 21 bp, synthetic construct
  misc_feature 1..21: note = Description of Artificial Sequence: Synthetic primer
  source 1..21: mol_type = other DNA
tgaacctgaattgtcactggc

SEQ ID NO: 782 - DNA, 22 bp, synthetic construct
  misc_feature 1..22: note = Description of Artificial Sequence: Synthetic primer
  source 1..22: mol_type = other DNA
gctcaagctcttcaaatgtacc

SEQ ID NO: 783 - DNA, 20 bp, synthetic construct
  misc_feature 1..20: note = Description of Artificial Sequence: Synthetic primer
  source 1..20: mol_type = other DNA
aattgtgcggatcaacttcg

SEQ ID NO: 784 - DNA, 23 bp, synthetic construct
  misc_feature 1..23: note = Description of Artificial Sequence: Synthetic primer
  source 1..23: mol_type = other DNA
tgtaactttcctcctttccaagc

SEQ ID NO: 785 - DNA, 20 bp, synthetic construct
  misc_feature 1..20: note = Description of Artificial Sequence: Synthetic primer
  source 1..20: mol_type = other DNA
cagtgaagctcgatggttgc

SEQ ID NO: 786 - DNA, 25 bp, synthetic construct
  misc_feature 1..25: note = Description of Artificial Sequence: Synthetic primer
  source 1..25: mol_type = other DNA
tccatgaacctacaaaggatattgc

SEQ ID NO: 787 - DNA, 21 bp, synthetic construct
  misc_feature 1..21: note = Description of Artificial Sequence: Synthetic primer
  source 1..21: mol_type = other DNA
ccgttgagagttacatgaggc

SEQ ID NO: 788 - DNA, 23 bp, synthetic construct
  misc_feature 1..23: note = Description of Artificial Sequence: Synthetic primer
  source 1..23: mol_type = other DNA
actggataaggcacattagaagg

SEQ ID NO: 789 - DNA, 20 bp, synthetic construct
  misc_feature 1..20: note = Description of Artificial Sequence: Synthetic primer
  source 1..20: mol_type = other DNA
acaagaggcatgtgatgagc

SEQ ID NO: 790 - DNA, 26 bp, synthetic construct
  misc_feature 1..26: note = Description of Artificial Sequence: Synthetic primer
  source 1..26: mol_type = other DNA
gggatttgatctataagtaacgcagc

SEQ ID NO: 791 - DNA, 23 bp, synthetic construct
  misc_feature 1..23: note = Description of Artificial Sequence: Synthetic primer
  source 1..23: mol_type = other DNA
tgtcgtctcaaatcttagcaacc

SEQ ID NO: 792 - DNA, 20 bp, synthetic construct
  misc_feature 1..20: note = Description of Artificial Sequence: Synthetic primer
  source 1..20: mol_type = other DNA
atgcaaaaatcggtctcccc

SEQ ID NO: 793 - DNA, 26 bp, synthetic construct
  misc_feature 1..26: note = Description of Artificial Sequence: Synthetic primer
  source 1..26: mol_type = other DNA
ttcttatgtgatgattggagtaatcg

SEQ ID NO: 794 - DNA, 28 bp, synthetic construct
  misc_feature 1..28: note = Description of Artificial Sequence: Synthetic primer
  source 1..28: mol_type = other DNA
gcttattttgttgtaaatgtgttgaagc

SEQ ID NO: 795 - DNA, 25 bp, synthetic construct
  misc_feature 1..25: note = Description of Artificial Sequence: Synthetic primer
  source 1..25: mol_type = other DNA
cgattgaagttaattgatgtggtgc

SEQ ID NO: 796 - DNA, 26 bp, synthetic construct
  misc_feature 1..26: note = Description of Artificial Sequence: Synthetic primer
  source 1..26: mol_type = other DNA
aaagaaaccctatatccatgttgtcg

SEQ ID NO: 797 - DNA, 21 bp, synthetic construct
  misc_feature 1..21: note = Description of Artificial Sequence: Synthetic primer
  source 1..21: mol_type = other DNA
gaatgtttggcgagtgacacc

SEQ ID NO: 798 - DNA, 20 bp, synthetic construct
  misc_feature 1..20: note = Description of Artificial Sequence: Synthetic primer
  source 1..20: mol_type = other DNA
aagggcctctctagggctcg

SEQ ID NO: 799 - DNA, 22 bp, synthetic construct
  misc_feature 1..22: note = Description of Artificial Sequence: Synthetic primer
  source 1..22: mol_type = other DNA
aagaacaccccaatgatgatcc

SEQ ID NO: 800 - DNA, 23 bp, synthetic construct
  misc_feature 1..23: note = Description of Artificial Sequence: Synthetic primer
  source 1..23: mol_type = other DNA
actaagctcctttttgtgcatgg

SEQ ID NO: 801 - DNA, 22 bp, synthetic construct
  misc_feature 1..22: note = Description of Artificial Sequence: Synthetic primer
  source 1..22: mol_type = other DNA
ggtggaaggaattagacagtgc

SEQ ID NO: 802 - DNA, 20 bp, synthetic construct
  misc_feature 1..20: note = Description of Artificial Sequence: Synthetic primer
  source 1..20: mol_type = other DNA
tcagcgattgaggaaagtgc

SEQ ID NO: 803 - DNA, 27 bp, synthetic construct
  misc_feature 1..27: note = Description of Artificial Sequence: Synthetic primer
  source 1..27: mol_type = other DNA
gggacaaaaattgtatggataaactcc

SEQ ID NO: 804 - DNA, 27 bp, synthetic construct
  misc_feature 1..27: note = Description of Artificial Sequence: Synthetic primer
  source 1..27: mol_type = other DNA
tccttttcaaactcttgttcaaattcc

SEQ ID NO: 805 - DNA, 21 bp, synthetic construct
  misc_feature 1..21: note = Description of Artificial Sequence: Synthetic primer
  source 1..21: mol_type = other DNA
agctcgatggttgaatgaagg

SEQ ID NO: 806 - DNA, 20 bp, synthetic construct
  misc_feature 1..20: note = Description of Artificial Sequence: Synthetic primer
  source 1..20: mol_type = other DNA
ggtctttggagagccactcg

SEQ ID NO: 807 - DNA, 22 bp, synthetic construct
  misc_feature 1..22: note = Description of Artificial Sequence: Synthetic primer
  source 1..22: mol_type = other DNA
tgatggcttgctctttagttgg

SEQ ID NO: 808 - DNA, 20 bp, synthetic construct
  misc_feature 1..20: note = Description of Artificial Sequence: Synthetic primer
  source 1..20: mol_type = other DNA
agccacgtcatccatgtacc

SEQ ID NO: 809 - DNA, 28 bp, synthetic construct
  misc_feature 1..28: note = Description of Artificial Sequence: Synthetic primer
  source 1..28: mol_type = other DNA
agaatgagcaagagagaaatcatatacc

SEQ ID NO: 810 - DNA, 20 bp, synthetic construct
  misc_feature 1..20: note = Description of Artificial Sequence: Synthetic primer
  source 1..20: mol_type = other DNA
ccatgcaataaccactcgcc

SEQ ID NO: 811 - DNA, 21 bp, synthetic construct
  misc_feature 1..21: note = Description of Artificial Sequence: Synthetic primer
  source 1..21: mol_type = other DNA
tctcaaaccaactgaagcagc

SEQ ID NO: 812 - DNA, 22 bp, synthetic construct
  misc_feature 1..22: note = Description of Artificial Sequence: Synthetic primer
  source 1..22: mol_type = other DNA
ttggatcaatgagcaagacagc

SEQ ID NO: 813 - DNA, 23 bp, synthetic construct
  misc_feature 1..23: note = Description of Artificial Sequence: Synthetic primer
  source 1..23: mol_type = other DNA
ggtcttcatcctttggaaaatcc

SEQ ID NO: 814 - DNA, 21 bp, synthetic construct
  misc_feature 1..21: note = Description of Artificial Sequence: Synthetic primer
  source 1..21: mol_type = other DNA
aagcaaccgaaatcgaagagc

SEQ ID NO: 815 - DNA, 22 bp, synthetic construct
  misc_feature 1..22: note = Description of Artificial Sequence: Synthetic primer
  source 1..22: mol_type = other DNA
agcttcacaaatgagagttcgc

SEQ ID NO: 816 - DNA, 21 bp, synthetic construct
  misc_feature 1..21: note = Description of Artificial Sequence: Synthetic primer
  source 1..21: mol_type = other DNA
tcgtgagaaggtagttgatgg

SEQ ID NO: 817 - DNA, 26 bp, synthetic construct
  misc_feature 1..26: note = Description of Artificial Sequence: Synthetic primer
  source 1..26: mol_type = other DNA
acagaatagtggagtgttacatttgg

SEQ ID NO: 818 - DNA, 28 bp, synthetic construct
  misc_feature 1..28: note = Description of Artificial Sequence: Synthetic primer
  source 1..28: mol_type = other DNA
ataatagtaagcaaagaaatcaacttgg

SEQ ID NO: 819 - DNA, 24 bp, synthetic construct
  misc_feature 1..24: note = Description of Artificial Sequence: Synthetic primer
  source 1..24: mol_type = other DNA
acaacttgccagagtacatgaaag

SEQ ID NO: 820 - DNA, 23 bp, synthetic construct
  misc_feature 1..23: note = Description of Artificial Sequence: Synthetic primer
  source 1..23: mol_type = other DNA
cgcgcagtatgaattttcctttg

SEQ ID NO: 821 - DNA, 26 bp, synthetic construct
  misc_feature 1..26: note = Description of Artificial Sequence: Synthetic primer
  source 1..26: mol_type = other DNA
ggatctgaagagctaatatcaatggc

SEQ ID NO: 822 - DNA, 24 bp, synthetic construct
  misc_feature 1..24: note = Description of Artificial Sequence: Synthetic primer
  source 1..24: mol_type = other DNA
agttcgtataatcttaggttgggg

SEQ ID NO: 823 - DNA, 23 bp, synthetic construct
  misc_feature 1..23: note = Description of Artificial Sequence: Synthetic primer
  source 1..23: mol_type = other DNA
tcaaaagatgtagtggcttctgc

SEQ ID NO: 824 - DNA, 24 bp, synthetic construct
  misc_feature 1..24: note = Description of Artificial Sequence: Synthetic primer
  source 1..24: mol_type = other DNA
attaagagtggtctaggaatagcg

SEQ ID NO: 825 - DNA, 26 bp, synthetic construct
  misc_feature 1..26: note = Description of Artificial Sequence: Synthetic primer
  source 1..26: mol_type = other DNA
caatatggtgtaacagatgaagaagc

SEQ ID NO: 826 - DNA, 26 bp, synthetic construct
  misc_feature 1..26: note = Description of Artificial Sequence: Synthetic primer
  source 1..26: mol_type = other DNA
tgagagtatcaatcaaattcttgagc

SEQ ID NO: 827 - DNA, 20 bp, synthetic construct
  misc_feature 1..20: note = Description of Artificial Sequence: Synthetic primer
  source 1..20: mol_type = other DNA
agccaactttgaaccatcca

SEQ ID NO: 828 - DNA, 28 bp, synthetic construct
  misc_feature 1..28: note = Description of Artificial Sequence: Synthetic primer
  source 1..28: mol_type = other DNA
aaagagactgaatgaaatcaaaagacca

SEQ ID NO: 829 - DNA, 22 bp, synthetic construct
  misc_feature 1..22: note = Description of Artificial Sequence: Synthetic primer
  source 1..22: mol_type = other DNA
gaggaagatgtgaaaaggatgc

SEQ ID NO: 830 - DNA, 22 bp, synthetic construct
  misc_feature 1..22: note = Description of Artificial Sequence: Synthetic primer
  source 1..22: mol_type = other DNA
gcctaaattcaagagcagtggc

SEQ ID NO: 831 - DNA, 28 bp, synthetic construct
  misc_feature 1..28: note = Description of Artificial Sequence: Synthetic primer
  source 1..28: mol_type = other DNA
caggaaaattcaaaacaaacataagtgg

SEQ ID NO: 832 - DNA, 23 bp, synthetic construct
  misc_feature 1..23: note = Description of Artificial Sequence: Synthetic primer
  source 1..23: mol_type = other DNA
agcttcctctaaaatgctttcgc

SEQ ID NO: 833 - DNA, 24 bp, synthetic construct
  misc_feature 1..24: note = Description of Artificial Sequence: Synthetic primer
  source 1..24: mol_type = other DNA
aggcgaaagcattttagaggaagc

SEQ ID NO: 834 - DNA, 24 bp, synthetic construct
  misc_feature 1..24: note = Description of Artificial Sequence: Synthetic primer
  source 1..24: mol_type = other DNA
agcttctattcttgtggtccttcg

SEQ ID NO: 835 - DNA, 22 bp, synthetic construct
  misc_feature 1..22: note = Description of Artificial Sequence: Synthetic primer
  source 1..22: mol_type = other DNA
ggtggaggcatactaaacttgg

SEQ ID NO: 836 - DNA, 28 bp, synthetic construct
  misc_feature 1..28: note = Description of Artificial Sequence: Synthetic primer
  source 1..28: mol_type = other DNA
tgaaaagctctaattcatctaatgttcc

SEQ ID NO: 837 - DNA, 25 bp, synthetic construct
  misc_feature 1..25: note = Description of Artificial Sequence: Synthetic primer
  source 1..25: mol_type = other DNA
gatgggatgtggaaatgataaatga

SEQ ID NO: 838 - DNA, 24 bp, synthetic construct
  misc_feature 1..24: note = Description of Artificial Sequence: Synthetic primer
  source 1..24: mol_type = other DNA
attttgatggtgatgtgttgatct

SEQ ID NO: 839 - DNA, 29 bp, synthetic construct
  misc_feature 1..29: note = Description of Artificial Sequence: Synthetic primer
  source 1..29: mol_type = other DNA
ctacaagaagcaaaatggtattacagtgg

SEQ ID NO: 840 - DNA, 23 bp, synthetic construct
  misc_feature 1..23: note = Description of Artificial Sequence: Synthetic primer
  source 1..23: mol_type = other DNA
gcacaataagaactggtgctccc

SEQ ID NO: 841 - DNA, 22 bp, synthetic construct
  misc_feature 1..22: note = Description of Artificial Sequence: Synthetic primer
  source 1..22: mol_type = other DNA
ggagcaccagttcttattgtgc

SEQ ID NO: 842 - DNA, 23 bp, synthetic construct
  misc_feature 1..23: note = Description of Artificial Sequence: Synthetic primer
  source 1..23: mol_type = other DNA
gcactgtgacgaattatggtagg

SEQ ID NO: 843 - DNA, 20 bp, synthetic construct
  misc_feature 1..20: note = Description of Artificial Sequence: Synthetic primer
  source 1..20: mol_type = other DNA
aaagaggtgatgctccgacg

SEQ ID NO: 844 - DNA, 23 bp, synthetic construct
  misc_feature 1..23: note = Description of Artificial Sequence: Synthetic primer
  source 1..23: mol_type = other DNA
agattatcctgagaactgtgacc

SEQ ID NO: 845 - DNA, 26 bp, synthetic construct
  misc_feature 1..26: note = Description of Artificial Sequence: Synthetic primer
  source 1..26: mol_type = other DNA
tcagaagagatcagcaaactatcaac

SEQ ID NO: 846 - DNA, 25 bp, synthetic construct
  misc_feature 1..25: note = Description of Artificial Sequence: Synthetic primer
  source 1..25: mol_type = other DNA
cttgaaaggagtagaaagtgattga

SEQ ID NO: 847 - DNA, 24 bp, synthetic construct
  misc_feature 1..24: note = Description of Artificial Sequence: Synthetic primer
  source 1..24: mol_type = other DNA
tgcaaagacttggaatctcttacc

SEQ ID NO: 848 - DNA, 24 bp, synthetic construct
  misc_feature 1..24: note = Description of Artificial Sequence: Synthetic primer
  source 1..24: mol_type = other DNA
catacacatttttgttggtgttgc

SEQ ID NO: 849 - DNA, 23 bp, synthetic construct
  misc_feature 1..23: note = Description of Artificial Sequence: Synthetic primer
  source 1..23: mol_type = other DNA
gaggcaattttatggtgtcttcc

SEQ ID NO: 850 - DNA, 23 bp, synthetic construct
  misc_feature 1..23: note = Description of Artificial Sequence: Synthetic primer
  source 1..23: mol_type = other DNA
ttgttttgtgtcttgtctcttcc

SEQ ID NO: 851 - DNA, 25 bp, synthetic construct
  misc_feature 1..25: note = Description of Artificial Sequence: Synthetic primer
  source 1..25: mol_type = other DNA
ggacaataggagtttcatttgagcc

SEQ ID NO: 852 - DNA, 23 bp, synthetic construct
  misc_feature 1..23: note = Description of Artificial Sequence: Synthetic primer
  source 1..23: mol_type = other DNA
tctcaaccacattagtgaagagc

SEQ ID NO: 853 - DNA, 24 bp, synthetic construct
  misc_feature 1..24: note = Description of Artificial Sequence: Synthetic primer
  source 1..24: mol_type = other DNA
tgggatgttagtgctatgaatggg

SEQ ID NO: 854 - DNA, 30 bp, synthetic construct
  misc_feature 1..30: note = Description of Artificial Sequence: Synthetic primer
  source 1..30: mol_type = other DNA
gaggctttttccttttaacacatcaaatgc

SEQ ID NO: 855 - DNA, 28 bp, synthetic construct
  misc_feature 1..28: note = Description of Artificial Sequence: Synthetic primer
  source 1..28: mol_type = other DNA
taagagaagcaagatggtattatgatgg

SEQ ID NO: 856 - DNA, 27 bp, synthetic construct
  misc_feature 1..27: note = Description of Artificial Sequence: Synthetic primer
  source 1..27: mol_type = other DNA
gtattatggtagggtatccattaaagc

SEQ ID NO: 857 - DNA, 23 bp, synthetic construct
  misc_feature 1..23: note = Description of Artificial Sequence: Synthetic primer
  source 1..23: mol_type = other DNA
cgtgtatgtgaagagaaagctcg

SEQ ID NO: 858 - DNA, 23 bp, synthetic construct
  misc_feature 1..23: note = Description of Artificial Sequence: Synthetic primer
  source 1..23: mol_type = other DNA
agtacatgatcttttgtttggcg

SEQ ID NO: 859 - DNA, 21 bp, synthetic construct
  misc_feature 1..21: note = Description of Artificial Sequence: Synthetic primer
  source 1..21: mol_type = other DNA
cagccaactttgaaccatcca

SEQ ID NO: 860 - DNA, 22 bp, synthetic construct
  misc_feature 1..22: note = Description of Artificial Sequence: Synthetic primer
  source 1..22: mol_type = other DNA
gcttgaaagagactgaacgaaa

SEQ ID NO: 861 - DNA, 23 bp, synthetic construct
  misc_feature 1..23: note = Description of Artificial Sequence: Synthetic primer
  source 1..23: mol_type = other DNA
cgacgaagatgtgaaaaggatgc

SEQ ID NO: 862 - DNA, 20 bp, synthetic construct
  misc_feature 1..20: note = Description of Artificial Sequence: Synthetic primer
  source 1..20: mol_type = other DNA
accatgttgacgtagaagcc

SEQ ID NO: 863 - DNA, 24 bp, synthetic construct
  misc_feature 1..24: note = Description of Artificial Sequence: Synthetic primer
  source 1..24: mol_type = other DNA
agctagaattttcacaactgaacg

SEQ ID NO: 864 - DNA, 23 bp, synthetic construct
  misc_feature 1..23: note = Description of Artificial Sequence: Synthetic primer
  source 1..23: mol_type = other DNA
gcttctattcttgtggtccttcg

SEQ ID NO: 865 - DNA, 26 bp, synthetic construct
  misc_feature 1..26: note = Description of Artificial Sequence: Synthetic primer
  source 1..26: mol_type = other DNA
tacgatattgaagtagtgaatcatgc

SEQ ID NO: 866 - DNA, 23 bp, synthetic construct
  misc_feature 1..23: note = Description of Artificial Sequence: Synthetic primer
  source 1..23: mol_type = other DNA
ttggcaaactcaagcaaaatagg

SEQ ID NO: 867 - DNA, 23 bp, synthetic construct
  misc_feature 1..23: note = Description of Artificial Sequence: Synthetic primer
  source 1..23: mol_type = other DNA
tggtggaggcatactaaacttgg

SEQ ID NO: 868 - DNA, 29 bp, synthetic construct
  misc_feature 1..29: note = Description of Artificial Sequence: Synthetic primer
  source 1..29: mol_type = other DNA
gtgaaaagctctaattcatctaatgttcc

SEQ ID NO: 869 - DNA, 26 bp, synthetic construct
  misc_feature 1..26: note = Description of Artificial Sequence: Synthetic primer
  source 1..26: mol_type = other DNA
gatgggatgtggaaatgataaatgaa

SEQ ID NO: 870 - DNA, 26 bp, synthetic construct
  misc_feature 1..26: note = Description of Artificial Sequence: Synthetic primer
  source 1..26: mol_type = other DNA
attttgatggtgatttgttgatctct

SEQ ID NO: 871 - DNA, 29 bp, synthetic construct
  misc_feature 1..29: note = Description of Artificial Sequence: Synthetic primer
  source 1..29: mol_type = other DNA
ctacaagaagcaaaatggtactacagtgg

SEQ ID NO: 872 - DNA, 23 bp, synthetic construct
  misc_feature 1..23: note = Description of Artificial Sequence: Synthetic primer
  source 1..23: mol_type = other DNA
gcacaataagaactggtgctccc

SEQ ID NO: 873 - DNA, 22 bp, synthetic construct
  misc_feature 1..22: note = Description of Artificial Sequence: Synthetic primer
  source 1..22: mol_type = other DNA
ggagcaccagttcttattgtgc

SEQ ID NO: 874 - DNA, 23 bp, synthetic construct
  misc_feature 1..23: note = Description of Artificial Sequence: Synthetic primer
  source 1..23: mol_type = other DNA
gcactgtgacgaattatggtagg

SEQ ID NO: 875 - DNA, 19 bp, synthetic construct
  misc_feature 1..19: note = Description of Artificial Sequence: Synthetic primer
  source 1..19: mol_type = other DNA
aagaggtgatgctccgacg

SEQ ID NO: 876 - DNA, 24 bp, synthetic construct
  misc_feature 1..24: note = Description of Artificial Sequence: Synthetic primer
  source 1..24: mol_type = other DNA
tagattatcctgagaactgtgacc

SEQ ID NO: 877 - DNA, 30 bp, synthetic construct; identical to SEQ ID NO: 645
  misc_feature 1..30: note = Description of Artificial Sequence: Synthetic primer
  source 1..30: mol_type = other DNA

SEQ ID NO: 878 - DNA, 21 bp, synthetic construct
  misc_feature 1..21: note = Description of Artificial Sequence: Synthetic primer
  source 1..21: mol_type = other DNA
ccgaaagcgaagagcatcagc

SEQ ID NO: 879 - DNA, 27 bp, synthetic construct
  misc_feature 1..27: note = Description of Artificial Sequence: Synthetic primer
  source 1..27: mol_type = other DNA
aattacttcatggtcttcaacctttgg

SEQ ID NO: 880 - DNA, 26 bp, synthetic construct
  misc_feature 1..26: note = Description of Artificial Sequence: Synthetic primer
  source 1..26: mol_type = other DNA
ctataaaatagccttgttccctaagc

SEQ ID NO: 881 - DNA, 22 bp, synthetic construct
  misc_feature 1..22: note = Description of Artificial Sequence: Synthetic primer
  source 1..22: mol_type = other DNA
agcttcacaaatgagagttcgc

SEQ ID NO: 882 - DNA, 20 bp, synthetic construct
  misc_feature 1..20: note = Description of Artificial Sequence: Synthetic primer
  source 1..20: mol_type = other DNA
cggatagggtgcattagggc

SEQ ID NO: 883 - DNA, 21 bp, synthetic construct
  misc_feature 1..21: note = Description of Artificial Sequence: Synthetic primer
  source 1..21: mol_type = other DNA
atgcaccctatccgaaagagc

SEQ ID NO: 884 - DNA, 25 bp, synthetic construct
  misc_feature 1..25: note = Description of Artificial Sequence: Synthetic primer
  source 1..25: mol_type = other DNA
ttccttttgatgtagttgttgaagc

SEQ ID NO: 885 - DNA, 26 bp, synthetic construct
  misc_feature 1..26: note = Description of Artificial Sequence: Synthetic primer
  source 1..26: mol_type = other DNA
acagaatagtggagtgttacatttgg

SEQ ID NO: 886 - DNA, 28 bp, synthetic construct
  misc_feature 1..28: note = Description of Artificial Sequence: Synthetic primer
  source 1..28: mol_type = other DNA
ataatagtaagcaaagaaatcaacttgg

SEQ ID NO: 887 - DNA, 23 bp, synthetic construct
  misc_feature 1..23: note = Description of Artificial Sequence: Synthetic primer
  source 1..23: mol_type = other DNA
tcatcaggtgggatatttttgct

SEQ ID NO: 888 - DNA, 21 bp, synthetic construct
  misc_feature 1..21: note = Description of Artificial Sequence: Synthetic primer
  source 1..21: mol_type = other DNA
acataactcgcgcagaatgaa

SEQ ID NO: 889 - DNA, 26 bp, synthetic construct
  misc_feature 1..26: note = Description of Artificial Sequence: Synthetic primer
  source 1..26: mol_type = other DNA
ggatctgaagagctaatatcaatggc

SEQ ID NO: 890 - DNA, 22 bp, synthetic construct
  misc_feature 1..22: note = Description of Artificial Sequence: Synthetic primer
  source 1..22: mol_type = other DNA
tcgtataatgttaggttggggc

SEQ ID NO: 891 - DNA, 23 bp, synthetic construct
  misc_feature 1..23: note = Description of Artificial Sequence: Synthetic primer
  source 1..23: mol_type = other DNA
tcaaaagatgtagtggcttctgc

SEQ ID NO: 892 - DNA, 24 bp, synthetic construct
  misc_feature 1..24: note = Description of Artificial Sequence: Synthetic primer
  source 1..24: mol_type = other DNA
attaagagtggtctaggaatagcg

SEQ ID NO: 893 - DNA, 26 bp, synthetic construct
  misc_feature 1..26: note = Description of Artificial Sequence: Synthetic primer
  source 1..26: mol_type = other DNA
acaaaaggttgaggaattaaaagagg

SEQ ID NO: 894 - DNA, 20 bp, synthetic construct
  misc_feature 1..20: note = Description of Artificial Sequence: Synthetic primer
  source 1..20: mol_type = other DNA
cccacaaggaaacatcatgc

SEQ ID NO: 895 - DNA, 23 bp, synthetic construct
  misc_feature 1..23: note = Description of Artificial Sequence: Synthetic primer
  source 1..23: mol_type = other DNA
cacacctaaatgagtttttggcg

SEQ ID NO: 896 - DNA, 22 bp, synthetic construct
  misc_feature 1..22: note = Description of Artificial Sequence: Synthetic primer
  source 1..22: mol_type = other DNA
cctgctgatttcactaagctcc

SEQ ID NO: 897 - DNA, 28 bp, synthetic construct
  misc_feature 1..28: note = Description of Artificial Sequence: Synthetic primer
  source 1..28: mol_type = other DNA
tgtggatgttaggagtctattatgaacc

SEQ ID NO: 898 - DNA, 24 bp, synthetic construct
  misc_feature 1..24: note = Description of Artificial Sequence: Synthetic primer
  source 1..24: mol_type = other DNA
atttcttgccaaagagtattgggg

SEQ ID NO: 899 - DNA, 25 bp, synthetic construct
  misc_feature 1..25: note = Description of Artificial Sequence: Synthetic primer
  source 1..25: mol_type = other DNA
ttgttatgaagagtttgagcaagtg

SEQ ID NO: 900 - DNA, 28 bp, synthetic construct
  misc_feature 1..28: note = Description of Artificial Sequence: Synthetic primer
  source 1..28: mol_type = other DNA
ctctataagtttcttcttttgtaagcac

SEQ ID NO: 901 - DNA, 23 bp, synthetic construct
  misc_feature 1..23: note = Description of Artificial Sequence: Synthetic primer
  source 1..23: mol_type = other DNA
gaagctcgatggttgaatagtgg

SEQ ID NO: 902 - DNA, 27 bp, synthetic construct
  misc_feature 1..27: note = Description of Artificial Sequence: Synthetic primer
  source 1..27: mol_type = other DNA
catgagcctacaaataataacagatgc

SEQ ID NO: 903 - DNA, 27 bp, synthetic construct
  misc_feature 1..27: note = Description of Artificial Sequence: Synthetic primer
  source 1..27: mol_type = other DNA
aaattagcttcacccatattacttagg

SEQ ID NO: 904 - DNA, 22 bp, synthetic construct
  misc_feature 1..22: note = Description of Artificial Sequence: Synthetic primer
  source 1..22: mol_type = other DNA
tgggatcaattagcaaagcagc

SEQ ID NO: 905 - DNA, 24 bp, synthetic construct
  misc_feature 1..24: note = Description of Artificial Sequence: Synthetic primer
  source 1..24: mol_type = other DNA
tccactcaaatcttagcatcatca

SEQ ID NO: 906 - DNA, 25 bp, synthetic construct
  misc_feature 1..25: note = Description of Artificial Sequence: Synthetic primer
  source 1..25: mol_type = other DNA
tggatgaaatgtttttgtaggacga

SEQ ID NO: 907 - DNA, 28 bp, synthetic construct
  misc_feature 1..28: note = Description of Artificial Sequence: Synthetic primer
  source 1..28: mol_type = other DNA
gaaaaggttgaggaattaaaagaagtgg

SEQ ID NO: 908 - DNA, 29 bp, synthetic construct
  misc_feature 1..29: note = Description of Artificial Sequence: Synthetic primer
  source 1..29: mol_type = other DNA
gtttcaaaatgataagacaatgccaaacg

SEQ ID NO: 909 - DNA, 23 bp, synthetic construct
  misc_feature 1..23: note = Description of Artificial Sequence: Synthetic primer
  source 1..23: mol_type = other DNA
aaaatgtttggcaagtgataccc

SEQ ID NO: 910 - DNA, 18 bp, synthetic construct
  misc_feature 1..18: note = Description of Artificial Sequence: Synthetic primer
  source 1..18: mol_type = other DNA
gggcctctctagggctcg

SEQ ID NO: 911 - DNA, 25 bp, synthetic construct
  misc_feature 1..25: note = Description of Artificial Sequence: Synthetic primer
  source 1..25: mol_type = other DNA
taggattgtggaattgtacctttgg

SEQ ID NO: 912 - DNA, 24 bp, synthetic construct
  misc_feature 1..24: note = Description of Artificial Sequence: Synthetic primer
  source 1..24: mol_type = other DNA
tgcatcataatcagtaattgaggc

SEQ ID NO: 913 - DNA, 27 bp, synthetic construct
  misc_feature 1..27: note = Description of Artificial Sequence: Synthetic primer
  source 1..27: mol_type = other DNA
aggacgttttgaattgttatgaagagt

SEQ ID NO: 914 - DNA, 28 bp, synthetic construct
  misc_feature 1..28: note = Description of Artificial Sequence: Synthetic primer
  source 1..28: mol_type = other DNA
tctttatgttacttctttttctagcact

SEQ ID NO: 915 - DNA, 26 bp, synthetic construct
  misc_feature 1..26: note = Description of Artificial Sequence: Synthetic primer
  source 1..26: mol_type = other DNA
actcaatcaagaatacatgcaaacat

SEQ ID NO: 916 - DNA, 24 bp, synthetic construct
  misc_feature 1..24: note = Description of Artificial Sequence: Synthetic primer
  source 1..24: mol_type = other DNA
gcacttgctcaaactcttcataac

SEQ ID NO: 917 - DNA, 23 bp, synthetic construct
  misc_feature 1..23: note = Description of Artificial Sequence: Synthetic primer
  source 1..23: mol_type = other DNA
tgtttgcatagaggactcatccc

SEQ ID NO: 918 - DNA, 21 bp, synthetic construct
  misc_feature 1..21: note = Description of Artificial Sequence: Synthetic primer
  source 1..21: mol_type = other DNA
tctttcgatctttggagagcc

SEQ ID NO: 919 - DNA, 22 bp, synthetic construct
  misc_feature 1..22: note = Description of Artificial Sequence: Synthetic primer
  source 1..22: mol_type = other DNA
gtttgcatagaggactcatccc

SEQ ID NO: 920 - DNA, 23 bp, synthetic construct
  misc_feature 1..23: note = Description of Artificial Sequence: Synthetic primer
  source 1..23: mol_type = other DNA
agttttcattccaaccaaagagc

SEQ ID NO: 921 - DNA, 22 bp, synthetic construct
  misc_feature 1..22: note = Description of Artificial Sequence: Synthetic primer
  source 1..22: mol_type = other DNA
tggtgtttgtgaagaagaagcc

SEQ ID NO: 922 - DNA, 21 bp, synthetic construct
  misc_feature 1..21: note = Description of Artificial Sequence: Synthetic primer
  source 1..21: mol_type = other DNA
ggtgaagctacttgagttggc

SEQ ID NO: 923 - DNA, 23 bp, synthetic construct
  misc_feature 1..23: note = Description of Artificial Sequence: Synthetic primer
  source 1..23: mol_type = other DNA
tttgtgaagccaactcaagtagc

SEQ ID NO: 924 - DNA, 23 bp, synthetic construct
  misc_feature 1..23: note = Description of Artificial Sequence: Synthetic primer
  source 1..23: mol_type = other DNA
attggatgaataagcaaagcagc

SEQ ID NO: 925 - DNA, 23 bp, synthetic construct
  misc_feature 1..23: note = Description of Artificial Sequence: Synthetic primer
  source 1..23: mol_type = other DNA
tcatcctttggaaaaccctttgg

SEQ ID NO: 926 - DNA, 21 bp, synthetic construct
  misc_feature 1..21: note = Description of Artificial Sequence: Synthetic primer
  source 1..21: mol_type = other DNA
aagcaaccgaaagcaaagagc

SEQ ID NO: 927 - DNA, 30 bp, synthetic construct
  misc_feature 1..30: note = Description of Artificial Sequence: Synthetic primer
  source 1..30: mol_type = other DNA
catattcgacaagtacaagaatgaaaaagg

SEQ ID NO: 928 - DNA, 22 bp, synthetic construct
  misc_feature 1..22: note = Description of Artificial Sequence: Synthetic primer
  source 1..22: mol_type = other DNA
ctccatgaactctcatttgtgc

SEQ ID NO: 929 - DNA, 24 bp, synthetic construct
  misc_feature 1..24: note = Description of Artificial Sequence: Synthetic primer
  source 1..24: mol_type = other DNA
ggagtgctatttctgggtttatgg

SEQ ID NO: 930 - DNA, 24 bp, synthetic construct
  misc_feature 1..24: note = Description of Artificial Sequence: Synthetic primer
  source 1..24: mol_type = other DNA
aggctctagttcttcaagtgtacc

SEQ ID NO: 931 - DNA, 20 bp, synthetic construct
  misc_feature 1..20: note = Description of Artificial Sequence: Synthetic primer
  source 1..20: mol_type = other DNA
gttggggttgatagtgcagg

SEQ ID NO: 932 - DNA, 27 bp, synthetic construct
  misc_feature 1..27: note = Description of Artificial Sequence: Synthetic primer
  source 1..27: mol_type = other DNA
tcattcataactcttccaactattgcc

SEQ ID NO: 933 - DNA, 21 bp, synthetic construct
  misc_feature 1..21: note = Description of Artificial Sequence: Synthetic primer
  source 1..21: mol_type = other DNA
ggagcggaagaaatcatcagg

SEQ ID NO: 934 - DNA, 22 bp, synthetic construct
  misc_feature 1..22: note = Description of Artificial Sequence: Synthetic primer
  source 1..22: mol_type = other DNA
tgggttgtgtaaagccatctcc

SEQ ID NO: 935 - DNA, 22 bp, synthetic construct
  misc_feature 1..22: note = Description of Artificial Sequence: Synthetic primer
  source 1..22: mol_type = other DNA
attcaacgattggggttgtctt

SEQ ID NO: 936 - DNA, 21 bp, synthetic construct
  misc_feature 1..21: note = Description of Artificial Sequence: Synthetic primer
  source 1..21: mol_type = other DNA
ccgaaagcaaagagcatcagc

SEQ ID NO: 937 - DNA, 30 bp, synthetic construct; identical to SEQ ID NO: 927
  misc_feature 1..30: note = Description of Artificial Sequence: Synthetic primer
  source 1..30: mol_type = other DNA

SEQ ID NO: 938 - DNA, 22 bp, synthetic construct
  misc_feature 1..22: note = Description of Artificial Sequence: Synthetic primer
  source 1..22: mol_type = other DNA
ctccatgaactctcatttgtgc

SEQ ID NO: 939 - DNA, 24 bp, synthetic construct
  misc_feature 1..24: note = Description of Artificial Sequence: Synthetic primer
  source 1..24: mol_type = other DNA
agaatagtggagtgctatttctgg

SEQ ID NO: 940 - DNA, 29 bp, synthetic construct
  misc_feature 1..29: note = Description of Artificial Sequence: Synthetic primer
  source 1..29: mol_type = other DNA
attattagtctgatttgggaagtttctgc

SEQ ID NO: 941 - DNA, 25 bp, synthetic construct
  misc_feature 1..25: note = Description of Artificial Sequence: Synthetic primer
  source 1..25: mol_type = other DNA
tggagtgctatttctgggtttatgg

SEQ ID NO: 942 - DNA, 27 bp, synthetic construct
  misc_feature 1..27: note = Description of Artificial Sequence: Synthetic primer
  source 1..27: mol_type = other DNA
atttggtgattattagtctgatttggg

SEQ ID NO: 943 - DNA, 20 bp, synthetic construct
  misc_feature 1..20: note = Description of Artificial Sequence: Synthetic primer
  source 1..20: mol_type = other DNA
gttggggttgatagtgcagg

SEQ ID NO: 944 - DNA, 27 bp, synthetic construct
  misc_feature 1..27: note = Description of Artificial Sequence: Synthetic primer
  source 1..27: mol_type = other DNA
tcattcataactcttccaactattgcc

SEQ ID NO: 945 - DNA, 22 bp, synthetic construct
  misc_feature 1..22: note = Description of Artificial Sequence: Synthetic primer
  source 1..22: mol_type = other DNA
gaaattgtggcttcaactgtgg

SEQ ID NO: 946 - DNA, 23 bp, synthetic construct
  misc_feature 1..23: note = Description of Artificial Sequence: Synthetic primer
  source 1..23: mol_type = other DNA
gagcaaagtgggttgtgtaaagc

SEQ ID NO: 947 - DNA, 25 bp, synthetic construct
  misc_feature 1..25: note = Description of Artificial Sequence: Synthetic primer
  source 1..25: mol_type = other DNA
agaaatcatcaggagaaattgtggc

SEQ ID NO: 948 - DNA, 22 bp, synthetic construct
  misc_feature 1..22: note = Description of Artificial Sequence: Synthetic primer
  source 1..22: mol_type = other DNA
tgggttgtgtaaagccatctcc

SEQ ID NO: 949 - DNA, 29 bp, synthetic construct
  misc_feature 1..29: note = Description of Artificial Sequence: Synthetic primer
  source 1..29: mol_type = other DNA
cacacaaatcttagtatcttcaaatgaca

SEQ ID NO: 950 - DNA, 27 bp, synthetic construct
  misc_feature 1..27: note = Description of Artificial Sequence: Synthetic primer
  source 1..27: mol_type = other DNA
caaatcttgttgtgaaatgttgtaatg

SEQ ID NO: 951 - DNA, 27 bp, synthetic construct
  misc_feature 1..27: note = Description of Artificial Sequence: Synthetic primer
  source 1..27: mol_type = other DNA
aaaaggttgaggaattaaaagaagtgg

SEQ ID NO: 952 - DNA, 30 bp, synthetic construct
  misc_feature 1..30: note = Description of Artificial Sequence: Synthetic primer
  source 1..30: mol_type = other DNA
agtttcaaaatgataagacaatcccaaacg

SEQ ID NO: 953 - DNA, 25 bp, synthetic construct
  misc_feature 1..25: note = Description of Artificial Sequence: Synthetic primer
  source 1..25: mol_type = other DNA
tgaaaaattcaaagacgaggatggg

SEQ ID NO: 954 - DNA, 25 bp, synthetic construct
  misc_feature 1..25: note = Description of Artificial Sequence: Synthetic primer
  source 1..25: mol_type = other DNA
catttaggtgtgttgttgtgaaagc

SEQ ID NO: 955 - DNA, 23 bp, synthetic construct
  misc_feature 1..23: note = Description of Artificial Sequence: Synthetic primer
  source 1..23: mol_type = other DNA
acttgctttcacaacaacacacc

SEQ ID NO: 956 - DNA, 20 bp, synthetic construct
  misc_feature 1..20: note = Description of Artificial Sequence: Synthetic primer
  source 1..20: mol_type = other DNA
aagggcctctctagggctcg

SEQ ID NO: 957 - DNA, 21 bp, synthetic construct
  misc_feature 1..21: note = Description of Artificial Sequence: Synthetic primer
  source 1..21: mol_type = other DNA
acaccatgaagacgatgatcc

SEQ ID NO: 958 - DNA, 23 bp, synthetic construct
  misc_feature 1..23: note = Description of Artificial Sequence: Synthetic primer
  source 1..23: mol_type = other DNA
acctgctgacttcactaagttcc

SEQ ID NO: 959 - DNA, 28 bp, synthetic construct
  misc_feature 1..28: note = Description of Artificial Sequence: Synthetic primer
  source 1..28: mol_type = other DNA
agataggattgtggaattatacctttgg

SEQ ID NO: 960 - DNA, 23 bp, synthetic construct
  misc_feature 1..23: note = Description of Artificial Sequence: Synthetic primer
  source 1..23: mol_type = other DNA
agctcaagttcttcaagtgtacc

SEQ ID NO: 961 - DNA, 26 bp, synthetic construct
  misc_feature 1..26: note = Description of Artificial Sequence: Synthetic primer
  source 1..26: mol_type = other DNA
tttgaattgttatgaagagtttgagc

SEQ ID NO: 962 - DNA, 27 bp, synthetic construct
  misc_feature 1..27: note = Description of Artificial Sequence: Synthetic primer
  source 1..27: mol_type = other DNA
tgtattgttcttctttttctagcactt

SEQ ID NO: 963 - DNA, 24 bp, synthetic construct
  misc_feature 1..24: note = Description of Artificial Sequence: Synthetic primer
  source 1..24: mol_type = other DNA
atttggatgaagctcgatgtttgc

SEQ ID NO: 964 - DNA, 28 bp, synthetic construct
  misc_feature 1..28: note = Description of Artificial Sequence: Synthetic primer
  source 1..28: mol_type = other DNA
ccatgagcctacaaatagtaacagatgc

SEQ ID NO: 965 - DNA, 20 bp, synthetic construct
  misc_feature 1..20: note = Description of Artificial Sequence: Synthetic primer
  source 1..20: mol_type = other DNA
tgaggaacattcagcagtgg

SEQ ID NO: 966 - DNA, 30 bp, synthetic construct
  misc_feature 1..30: note = Description of Artificial Sequence: Synthetic primer
  source 1..30: mol_type = other DNA
gcttcaaaaactcttcatttatttctttcc

SEQ ID NO: 967 - DNA, 28 bp, synthetic construct
  misc_feature 1..28: note = Description of Artificial Sequence: Synthetic primer
  source 1..28: mol_type = other DNA
aagaaataaatgaagagtttttgaagcc

SEQ ID NO: 968 - DNA, 23 bp, synthetic construct
  misc_feature 1..23: note = Description of Artificial Sequence: Synthetic primer
  source 1..23: mol_type = other DNA
ccaacgtgtgtataaccatctcc

SEQ ID NO: 969 - DNA, 24 bp, synthetic construct
  misc_feature 1..24: note = Description of Artificial Sequence: Synthetic primer
  source 1..24: mol_type = other DNA
atgtcactatcaggactaatctcc

SEQ ID NO: 970 - DNA, 21 bp, synthetic construct
  misc_feature 1..21: note = Description of Artificial Sequence: Synthetic primer
  source 1..21: mol_type = other DNA
aaaatgagcatcccacaatgg

SEQ ID NO: 971 - DNA, 25 bp, synthetic construct
  misc_feature 1..25: note = Description of Artificial Sequence: Synthetic primer
  source 1..25: mol_type = other DNA
agctatgggaaaagaatcaatgagc

SEQ ID NO: 972 - DNA, 23 bp, synthetic construct
  misc_feature 1..23: note = Description of Artificial Sequence: Synthetic primer
  source 1..23: mol_type = other DNA
gagtttgaaatgaagagcagtgg

SEQ ID NO: 973 - DNA, 22 bp, synthetic construct
  misc_feature 1..22: note = Description of Artificial Sequence: Synthetic primer
  source 1..22: mol_type = other DNA
gacgagaaaaaggagttcaagg

SEQ ID NO: 974 - DNA, 27 bp, synthetic construct
  misc_feature 1..27: note = Description of Artificial Sequence: Synthetic primer
  source 1..27: mol_type = other DNA
tcatcaagtattgtttgagatgtttgg

SEQ ID NO: 975 - DNA, 25 bp, synthetic construct
  misc_feature 1..25: note = Description of Artificial Sequence: Synthetic primer
  source 1..25: mol_type = other DNA
gccgaaaaatgctcacaaagattgg

SEQ ID NO: 976 - DNA, 24 bp, synthetic construct
  misc_feature 1..24: note = Description of Artificial Sequence: Synthetic primer
  source 1..24: mol_type = other DNA
cttcccaatgcgtgttgaaagagg

SEQ ID NO: 977 - DNA, 26 bp, synthetic construct
  misc_feature 1..26: note = Description of Artificial Sequence: Synthetic primer
  source 1..26: mol_type = other DNA
accaacttccagattacatgaagata

SEQ ID NO: 978 - DNA, 20 bp, synthetic construct
  misc_feature 1..20: note = Description of Artificial Sequence: Synthetic primer
  source 1..20: mol_type = other DNA
tagcacgtcatacgccattt

SEQ ID NO: 979 - DNA, 30 bp, synthetic construct
  misc_feature 1..30: note = Description of Artificial Sequence: Synthetic primer
  source 1..30: mol_type = other DNA
gaacccttaattctagtcaatctttattgc

SEQ ID NO: 980 - DNA, 25 bp, synthetic construct
  misc_feature 1..25: note = Description of Artificial Sequence: Synthetic primer
  source 1..25: mol_type = other DNA
ttcctaaatcatcaacaagtcgagc

SEQ ID NO: 981 - DNA, 24 bp, synthetic construct
  misc_feature 1..24: note = Description of Artificial Sequence: Synthetic primer
  source 1..24: mol_type = other DNA
tgaactgaaaagaggagacaatcc

SEQ ID NO: 982 - DNA, 20 bp, synthetic construct
  misc_feature 1..20: note = Description of Artificial Sequence: Synthetic primer
  source 1..20: mol_type = other DNA
aatggagactcacccactcg

SEQ ID NO: 983 - DNA, 23 bp, synthetic construct
  misc_feature 1..23: note = Description of Artificial Sequence: Synthetic primer
  source 1..23: mol_type = other DNA
gccatagatttcgttaggacagc

SEQ ID NO: 984 - DNA, 23 bp, synthetic construct
  misc_feature 1..23: note = Description of Artificial Sequence: Synthetic primer
  source 1..23: mol_type = other DNA
gggaatggaagtgaagaacaagg

SEQ ID NO: 985 - DNA, 24 bp, synthetic construct
  misc_feature 1..24: note = Description of Artificial Sequence: Synthetic primer
  source 1..24: mol_type = other DNA
tcaaagaacaaccagcaatagtcc

SEQ ID NO: 986 - DNA, 24 bp, synthetic construct
  misc_feature 1..24: note = Description of Artificial Sequence: Synthetic primer
  source 1..24: mol_type = other DNA
ttggagtgattggataaaatgagc

SEQ ID NO: 987 - DNA, 24 bp, synthetic construct
  misc_feature 1..24: note = Description of Artificial Sequence: Synthetic primer
  source 1..24: mol_type = other DNA
gctatgggaaaagaatcaatgagc

SEQ ID NO: 988 - DNA, 22 bp, synthetic construct
  misc_feature 1..22: note = Description of Artificial Sequence: Synthetic primer
  source 1..22: mol_type = other DNA
agtttgaaatgaagagcagtgg

SEQ ID NO: 989 - DNA, 24 bp, synthetic construct
  misc_feature 1..24: note = Description of Artificial Sequence: Synthetic primer
  source 1..24: mol_type = other DNA
tcttgagaaggaggctgaaaatcc

SEQ ID NO: 990 - DNA, 24 bp, synthetic construct
  misc_feature 1..24: note = Description of Artificial Sequence: Synthetic primer
  source 1..24: mol_type = other DNA
ggagtttgaaatgaagagcagtgg

SEQ ID NO: 991 - DNA, 27 bp, synthetic construct
  misc_feature 1..27: note = Description of Artificial Sequence: Synthetic primer
  source 1..27: mol_type = other DNA
ggagagtttgagtaaagatgtgaaagg

SEQ ID NO: 992 - DNA, 24 bp, synthetic construct
  misc_feature 1..24: note = Description of Artificial Sequence: Synthetic primer
  source 1..24: mol_type = other DNA
tccaaccttttcattctccaatgc

SEQ ID NO: 993 - DNA, 26 bp, synthetic construct
  misc_feature 1..26: note = Description of Artificial Sequence: Synthetic primer
  source 1..26: mol_type = other DNA
tttgagtaaagatgtgaaaggaatgg

SEQ ID NO: 994 - DNA, 25 bp, synthetic construct
  misc_feature 1..25: note = Description of Artificial Sequence: Synthetic primer
  source 1..25: mol_type = other DNA
gatgtttggttgtgaaatctcttgc

SEQ ID NO: 995 - DNA, 23 bp, synthetic construct
  misc_feature 1..23: note = Description of Artificial Sequence: Synthetic primer
  source 1..23: mol_type = other DNA
gagccacagtttagatattgccg

SEQ ID NO: 996 - DNA, 21 bp, synthetic construct
  misc_feature 1..21: note = Description of Artificial Sequence: Synthetic primer
  source 1..21: mol_type = other DNA
agaggcttagctcatcaagcg

SEQ ID NO: 997 - DNA, 25 bp, synthetic construct
  misc_feature 1..25: note = Description of Artificial Sequence: Synthetic primer
  source 1..25: mol_type = other DNA
cgaccaacttccagattacatgaag

SEQ ID NO: 998 - DNA, 21 bp, synthetic construct
  misc_feature 1..21: note = Description of Artificial Sequence: Synthetic primer
  source 1..21: mol_type = other DNA
agcacgtcatacgccatttca

SEQ ID NO: 999 - DNA, 25 bp, synthetic construct
  misc_feature 1..25: note = Description of Artificial Sequence: Synthetic primer
  source 1..25: mol_type = other DNA
tggaggcaaattggtatcatagtgg

SEQ ID NO: 1000 - DNA, 23 bp, synthetic construct
  misc_feature 1..23: note = Description of Artificial Sequence: Synthetic primer
  source 1..23: mol_type = other DNA
aaaggtgggatattgaagcaagc

SEQ ID NO: 1001 - DNA, 30 bp, synthetic construct; identical to SEQ ID NO: 979
  misc_feature 1..30: note = Description of Artificial Sequence: Synthetic primer
  source 1..30: mol_type = other DNA

SEQ ID NO: 1002 - DNA, 25 bp, synthetic construct
  misc_feature 1..25: note = Description of Artificial Sequence: Synthetic primer
  source 1..25: mol_type = other DNA
ttcctaaatcatcaacaagtcgagc

SEQ ID NO: 1003 - DNA, 24 bp, synthetic construct
  misc_feature 1..24: note = Description of Artificial Sequence: Synthetic primer
  source 1..24: mol_type = other DNA
tgaactgaaaagaggagacaatcc

SEQ ID NO: 1004 - DNA, 20 bp, synthetic construct
  misc_feature 1..20: note = Description of Artificial Sequence: Synthetic primer
  source 1..20: mol_type = other DNA
aatggagactcacccactcg

SEQ ID NO: 1005 - DNA, 23 bp, synthetic construct
  misc_feature 1..23: note = Description of Artificial Sequence: Synthetic primer
  source 1..23: mol_type = other DNA
tggaaggaaatgaatgaagctcg

SEQ ID NO: 1006 - DNA, 21 bp, synthetic construct
  misc_feature 1..21: note = Description of Artificial Sequence: Synthetic primer
  source 1..21: mol_type = other DNA
accccatcttgctccttttgg

SEQ ID NO: 1007 - DNA, 23 bp, synthetic construct
  misc_feature 1..23: note = Description of Artificial Sequence: Synthetic primer
  source 1..23: mol_type = other DNA
gagcttgactatgttgaaaaccc

SEQ ID NO: 1008 - DNA, 24 bp, synthetic construct
  misc_feature 1..24: note = Description of Artificial Sequence: Synthetic primer
  source 1..24: mol_type = other DNA
ataaccttgttgtctaaccaatcg

SEQ ID NO: 1009 - DNA, 23 bp, synthetic construct
  misc_feature 1..23: note = Description of Artificial Sequence: Synthetic primer
  source 1..23: mol_type = other DNA
gcttcacaactaagagtgcatgg

SEQ ID NO: 1010 - DNA, 24 bp, synthetic construct
  misc_feature 1..24: note = Description of Artificial Sequence: Synthetic primer
  source 1..24: mol_type = other DNA
taatgtctagcctgtctcctttgc

SEQ ID NO: 1011 - DNA, 24 bp, synthetic construct
  misc_feature 1..24: note = Description of Artificial Sequence: Synthetic primer
  source 1..24: mol_type = other DNA
aacgatattcgaggaatgttaagc

SEQ ID NO: 1012 - DNA, 23 bp, synthetic construct
  misc_feature 1..23: note = Description of Artificial Sequence: Synthetic primer
  source 1..23: mol_type = other DNA
aggttttagctccagattcgagg

SEQ ID NO: 1013 - DNA, 28 bp, synthetic construct
  misc_feature 1..28: note = Description of Artificial Sequence: Synthetic primer
  source 1..28: mol_type = other DNA
taatggattgttacttttggacttttgg

SEQ ID NO: 1014 - DNA, 26 bp, synthetic construct
  misc_feature 1..26: note = Description of Artificial Sequence: Synthetic primer
  source 1..26: mol_type = other DNA
gtattgcttcagttaagaggtgtagc

SEQ ID NO: 1015 - DNA, 24 bp, synthetic construct
  misc_feature 1..24: note = Description of Artificial Sequence: Synthetic primer
  source 1..24: mol_type = other DNA
tcaactaccagagtacattcaacc

SEQ ID NO: 1016 - DNA, 30 bp, synthetic construct
  misc_feature 1..30: note = Description of Artificial Sequence: Synthetic primer
  source 1..30: mol_type = other DNA
gcaatatgatttgtccttagtaaattctcc

SEQ ID NO: 1017 - DNA, 22 bp, synthetic construct
  misc_feature 1..22: note = Description of Artificial Sequence: Synthetic primer
  source 1..22: mol_type = other DNA
cacttgttactgctgcttctcc

SEQ ID NO: 1018 - DNA, 24 bp, synthetic construct
  misc_feature 1..24: note = Description of Artificial Sequence: Synthetic primer
  source 1..24: mol_type = other DNA
gccaatgtcgttaagaactctacc

SEQ ID NO: 1019 - DNA, 25 bp, synthetic construct
  misc_feature 1..25: note = Description of Artificial Sequence: Synthetic primer
  source 1..25: mol_type = other DNA
tctgaatgaagagtgtctctatccc

SEQ ID NO: 1020 - DNA, 24 bp, synthetic construct
  misc_feature 1..24: note = Description of Artificial Sequence: Synthetic primer
  source 1..24: mol_type = other DNA
agcttctcttgtaaaaccatctcc

SEQ ID NO: 1021 - DNA, 24 bp, synthetic construct
  misc_feature 1..24: note = Description of Artificial Sequence: Synthetic primer
  source 1..24: mol_type = other DNA
atcatcgaaattgaaagacacagg

SEQ ID NO: 1022 - DNA, 20 bp, synthetic construct
  misc_feature 1..20: note = Description of Artificial Sequence: Synthetic primer
  source 1..20: mol_type = other DNA
gggcaagatagttgctctgc

SEQ ID NO: 1023 - DNA, 21 bp, synthetic construct
  misc_feature 1..21: note = Description of Artificial Sequence: Synthetic primer
  source 1..21: mol_type = other DNA
gagcaactatcttgcccaacc

SEQ ID NO: 1024 - DNA, 27 bp, synthetic construct
  misc_feature 1..27: note = Description of Artificial Sequence: Synthetic primer
  source 1..27: mol_type = other DNA
tcatatttgttgttaagagactccagg

SEQ ID NO: 1025 - DNA, 21 bp, synthetic construct
  misc_feature 1..21: note = Description of Artificial Sequence: Synthetic primer
  source 1..21: mol_type = other DNA
agcttatcgaggatgtgaggc

SEQ ID NO: 1026 - DNA, 20 bp, synthetic construct
  misc_feature 1..20: note = Description of Artificial Sequence: Synthetic primer
  source 1..20: mol_type = other DNA
tccatgaagcctaagaagcc

SEQ ID NO: 1027 - DNA, 24 bp, synthetic construct
  misc_feature 1..24: note = Description of Artificial Sequence: Synthetic primer
  source 1..24: mol_type = other DNA
tgtttcacaaggcatatttgttgg

SEQ ID NO: 1028 - DNA, 21 bp, synthetic construct
  misc_feature 1..21: note = Description of Artificial Sequence: Synthetic primer
  source 1..21: mol_type = other DNA
agttccaaagcatgaaccacc

SEQ ID NO: 1029 - DNA, 20 bp, synthetic construct
  misc_feature 1..20: note = Description of Artificial Sequence: Synthetic primer
  source 1..20: mol_type = other DNA
gttggtggaagaatgtgggc

SEQ ID NO: 1030 - DNA, 22 bp, synthetic construct
  misc_feature 1..22: note = Description of Artificial Sequence: Synthetic primer
  source 1..22: mol_type = other DNA
ggcattggtgaagtgtctgagc

SEQ ID NO: 1031 - DNA, 24 bp, synthetic construct
  misc_feature 1..24: note = Description of Artificial Sequence: Synthetic primer
  source 1..24: mol_type = other DNA
tgtacgggaaactgaaaaacttcc

SEQ ID NO: 1032 - DNA, 28 bp, synthetic construct
  misc_feature 1..28: note = Description of Artificial Sequence: Synthetic primer
  source 1..28: mol_type = other DNA
ccctttagatgaggtaaaactaacttgc

SEQ ID NO: 1033 - DNA, 21 bp, synthetic construct
  misc_feature 1..21: note = Description of Artificial Sequence: Synthetic primer
  source 1..21: mol_type = other DNA
gcttggatttcatcttcgggc

SEQ ID NO: 1034 - DNA, 23 bp, synthetic construct
  misc_feature 1..23: note = Description of Artificial Sequence: Synthetic primer
  source 1..23: mol_type = other DNA
cgctgaagttcctaaatcgttgc

SEQ ID NO: 1035 - DNA, 27 bp, synthetic construct
  misc_feature 1..27: note = Description of Artificial Sequence: Synthetic primer
  source 1..27: mol_type = other DNA
cctctcattcccaataagtaaactagc

SEQ ID NO: 1036 - DNA, 23 bp, synthetic construct
  misc_feature 1..23: note = Description of Artificial Sequence: Synthetic primer
  source 1..23: mol_type = other DNA
tcctcaaagtacaggagacatcg

SEQ ID NO: 1037 - DNA, 22 bp, synthetic construct
  misc_feature 1..22: note = Description of Artificial Sequence: Synthetic primer
  source 1..22: mol_type = other DNA
ttgatgctattcaacggctagg

SEQ ID NO: 1038 - DNA, 20 bp, synthetic construct
  misc_feature 1..20: note = Description of Artificial Sequence: Synthetic primer
  source 1..20: mol_type = other DNA
cagcaggaacgaagtgaccg

SEQ ID NO: 1039 - DNA, 22 bp, synthetic construct
  misc_feature 1..22: note = Description of Artificial Sequence: Synthetic primer
  source 1..22: mol_type = other DNA
atatgaagcctcccatctatgc

SEQ ID NO: 1040 - DNA, 23 bp, synthetic construct
  misc_feature 1..23: note = Description of Artificial Sequence: Synthetic primer
  source 1..23: mol_type = other DNA
tgggatagacaccaaaaaggtcc

SEQ ID NO: 1041 - DNA, 22 bp, synthetic construct
  misc_feature 1..22: note = Description of Artificial Sequence: Synthetic primer
  source 1..22: mol_type = other DNA
ggtggcgagacattggtttagc

SEQ ID NO: 1042 - DNA, 22 bp, synthetic construct
  misc_feature 1..22: note = Description of Artificial Sequence: Synthetic primer
  source 1..22: mol_type = other DNA
atggattttgtaagcgcaaccc

SEQ ID NO: 1043 - DNA, 26 bp, synthetic construct
  misc_feature 1..26: note = Description of Artificial Sequence: Synthetic primer
  source 1..26: mol_type = other DNA
tatagaaaaacttccagactccatga

SEQ ID NO: 1044 - DNA, 19 bp, synthetic construct
  misc_feature 1..19: note = Description of Artificial Sequence: Synthetic primer
  source 1..19: mol_type = other DNA
taaagggctccatccacgc

SEQ ID NO: 1045 - DNA, 19 bp, synthetic construct
  misc_feature 1..19: note = Description of Artificial Sequence: Synthetic primer
  source 1..19: mol_type = other DNA
gggcaagtttgtgcgaagc

SEQ ID NO: 1046 - DNA, 21 bp, synthetic construct
  misc_feature 1..21: note = Description of Artificial Sequence: Synthetic primer
  source 1..21: mol_type = other DNA
tggcactaccaaagtcatccc

SEQ ID NO: 1047 - DNA, 23 bp, synthetic construct
  misc_feature 1..23: note = Description of Artificial Sequence: Synthetic primer
  source 1..23: mol_type = other DNA
aggacatgacggatcttatgtgg

SEQ ID NO: 1048 - DNA, 20 bp, synthetic construct
  misc_feature 1..20: note = Description of Artificial Sequence: Synthetic primer
  source 1..20: mol_type = other DNA
aggaatggtggtggaaacgc

SEQ ID NO: 1049 - DNA, 21 bp, synthetic construct
  misc_feature 1..21: note = Description of Artificial Sequence: Synthetic primer
  source 1..21: mol_type = other DNA
tccaccaccattcctcaaagc

SEQ ID NO: 1050 - DNA, 22 bp, synthetic construct
  misc_feature 1..22: note = Description of Artificial Sequence: Synthetic primer
  source 1..22: mol_type = other DNA
atgttcttccaagtggggtagg

SEQ ID NO: 1051 - DNA, 20 bp, synthetic construct
  misc_feature 1..20: note = Description of Artificial Sequence: Synthetic primer
  source 1..20: mol_type = other DNA
gaacttggtcaacgctgtgc

SEQ ID NO: 1052 - DNA, 22 bp, synthetic construct
  misc_feature 1..22: note = Description of Artificial Sequence: Synthetic primer
  source 1..22: mol_type = other DNA
acctccttgtctcagtaatcgg

SEQ ID NO: 1053 - DNA, 22 bp, synthetic construct
  misc_feature 1..22: note = Description of Artificial Sequence: Synthetic primer
  source 1..22: mol_type = other DNA
tagtggaagaagacagagaggg

SEQ ID NO: 1054 - DNA, 22 bp, synthetic construct
  misc_feature 1..22: note = Description of Artificial Sequence: Synthetic primer
  source 1..22: mol_type = other DNA
agtgttggctgagaaactgtcc

SEQ ID NO: 1055 - DNA, 20 bp, synthetic construct
  misc_feature 1..20: note = Description of Artificial Sequence: Synthetic primer
  source 1..20: mol_type = other DNA
tctcagccaacactgctacc

SEQ ID NO: 1056 - DNA, 24 bp, synthetic construct
  misc_feature 1..24: note = Description of Artificial Sequence: Synthetic primer
  source 1..24: mol_type = other DNA
gagacttgaacaatttccctttgg

SEQ ID NO: 1057 - DNA, 21 bp, synthetic construct
  misc_feature 1..21: note = Description of Artificial Sequence: Synthetic primer
  source 1..21: mol_type = other DNA
ggtggaaagagcttggtttgg

SEQ ID NO: 1058 - DNA, 21 bp, synthetic construct
  misc_feature 1..21: note = Description of Artificial Sequence: Synthetic primer
  source 1..21: mol_type = other DNA
gagtgagttcgtctagtgtcc

SEQ ID NO: 1059 - DNA, 24 bp, synthetic construct
  misc_feature 1..24: note = Description of Artificial Sequence: Synthetic primer
  source 1..24: mol_type = other DNA
gggaaattaaagagcagttacccg

SEQ ID NO: 1060 - DNA, 22 bp, synthetic construct
  misc_feature 1..22: note = Description of Artificial Sequence: Synthetic primer
  source 1..22: mol_type = other DNA
gggttccatccatgttttctgt

SEQ ID NO: 1061 - DNA, 21 bp, synthetic construct
  misc_feature 1..21: note = Description of Artificial Sequence: Synthetic primer
  source 1..21: mol_type = other DNA
ggtttggttgtgggaagttgc

SEQ ID NO: 1062 - DNA, 21 bp, synthetic construct
  misc_feature 1..21: note = Description of Artificial Sequence: Synthetic primer
  source 1..21: mol_type = other DNA
ctgctgtagaagacacaaggc

SEQ ID NO: 1063 - DNA, 21 bp, synthetic construct
  misc_feature 1..21: note = Description of Artificial Sequence: Synthetic primer
  source 1..21: mol_type = other DNA
gaacgcgattgtgagttctgg

SEQ ID NO: 1064 - DNA, 20 bp, synthetic construct
  misc_feature 1..20: note = Description of Artificial Sequence: Synthetic primer
  source 1..20: mol_type = other DNA
ggcacttcctaagtcatccc

SEQ ID NO: 1065 - DNA, 21 bp, synthetic construct
  misc_feature 1..21: note = Description of Artificial Sequence: Synthetic primer
  source 1..21: mol_type = other DNA
atgggcatgatgggtcttacg

SEQ ID NO: 1066 - DNA, 20 bp, synthetic construct
  misc_feature 1..20: note = Description of Artificial Sequence: Synthetic primer
  source 1..20: mol_type = other DNA
ctccttattgaggcgttccc

SEQ ID NO: 1067 - DNA, 20 bp, synthetic construct
  misc_feature 1..20: note = Description of Artificial Sequence: Synthetic primer
  source 1..20: mol_type = other DNA
gcaagggagcaagtgattcg

SEQ ID NO: 1068 - DNA, 18 bp, synthetic construct
  misc_feature 1..18: note = Description of Artificial Sequence: Synthetic primer
  source 1..18: mol_type = other DNA
ctggaggcttggaaggcg

SEQ ID NO: 1069 - DNA, 23 bp, synthetic construct
  misc_feature 1..23: note = Description of Artificial Sequence: Synthetic primer
  source 1..23: mol_type = other DNA
actcggctactttctcaaagagg

SEQ ID NO: 1070 - DNA, 23 bp, synthetic construct
  misc_feature 1..23: note = Description of Artificial Sequence: Synthetic primer
  source 1..23: mol_type = other DNA
atggattaccaaaacgaggaagc

SEQ ID NO: 1071 - DNA, 24 bp, synthetic construct
  misc_feature 1..24: note = Description of Artificial Sequence: Synthetic primer
  source 1..24: mol_type = other DNA
aggctcatagatagcatccaacgg

SEQ ID NO: 1072 - DNA, 20 bp, synthetic construct
  misc_feature 1..20: note = Description of Artificial Sequence: Synthetic primer
  source 1..20: mol_type = other DNA
gtagccgaaaacgaagcccc

SEQ ID NO: 1073 - DNA, 29 bp, synthetic construct
  misc_feature 1..29: note = Description of Artificial Sequence: Synthetic primer
  source 1..29: mol_type = other DNA
tccttcagatgttgtcagatttcaattcc

SEQ ID NO: 1074 - DNA, 24 bp, synthetic construct
  misc_feature 1..24: note = Description of Artificial Sequence: Synthetic primer
  source 1..24: mol_type = other DNA
gaggtagttggaaagccattatgc

SEQ ID NO: 1075 - DNA, 20 bp, synthetic construct
  misc_feature 1..20: note = Description of Artificial Sequence: Synthetic primer
  source 1..20: mol_type = other DNA
atgctgagcttgtatgaggc

SEQ ID NO: 1076 - DNA, 20 bp, synthetic construct
  misc_feature 1..20: note = Description of Artificial Sequence: Synthetic primer
  source 1..20: mol_type = other DNA
caagaagagcagggcagtgg

SEQ ID NO: 1077 - DNA, 19 bp, synthetic construct
  misc_feature 1..19: note = Description of Artificial Sequence: Synthetic primer
  source 1..19: mol_type = other DNA
gacacctgaggatggcacc

SEQ ID NO: 1078 - DNA, 21 bp, synthetic construct
  misc_feature 1..21: note = Description of Artificial Sequence: Synthetic primer
  source 1..21: mol_type = other DNA
ttgtggagtgactgaagctcg

SEQ ID NO: 1079 - DNA, 20 bp, synthetic construct
  misc_feature 1..20: note = Description of Artificial Sequence: Synthetic primer
  source 1..20: mol_type = other DNA
gtggaaacagttgggtctgg

SEQ ID NO: 1080 - DNA, 22 bp, synthetic construct
  misc_feature 1..22: note = Description of Artificial Sequence: Synthetic primer
  source 1..22: mol_type = other DNA
gtggagttcatccaaagatccg

SEQ ID NO: 1081 - DNA, 21 bp, synthetic construct
  misc_feature 1..21: note = Description of Artificial Sequence: Synthetic primer
  source 1..21: mol_type = other DNA
gatgggatcttggtgcaatgg

SEQ ID NO: 1082 - DNA, 25 bp, synthetic construct
  misc_feature 1..25: note = Description of Artificial Sequence: Synthetic primer
  source 1..25: mol_type = other DNA
acatattttcatgtactcaggaagc

SEQ ID NO: 1083 - DNA, 23 bp, synthetic construct
  misc_feature 1..23: note = Description of Artificial Sequence: Synthetic primer
  source 1..23: mol_type = other DNA
tgaaattggctacagagttctca

SEQ ID NO: 1084 - DNA, 23 bp, synthetic construct
  misc_feature 1..23: note = Description of Artificial Sequence: Synthetic primer
  source 1..23: mol_type = other DNA
agtgttgtgtaacgcataatcca

SEQ ID NO: 1085 - DNA, 24 bp, synthetic construct
  misc_feature 1..24: note = Description of Artificial Sequence: Synthetic primer
  source 1..24: mol_type = other DNA
gcatttctaaccgaagcagaatgg

SEQ ID NO: 1086 - DNA, 21 bp, synthetic construct
  misc_feature 1..21: note = Description of Artificial Sequence: Synthetic primer
  source 1..21: mol_type = other DNA
tggctgttcccaaatcatccc

SEQ ID NO: 1087 - DNA, 26 bp, synthetic construct
  misc_feature 1..26: note = Description of Artificial Sequence: Synthetic primer
  source 1..26: mol_type = other DNA
cactcatttttcctcataggtcatgg

SEQ ID NO: 1088 - DNA, 22 bp, synthetic construct
  misc_feature 1..22: note = Description of Artificial Sequence: Synthetic primer
  source 1..22: mol_type = other DNA
ttggctgttcccaaatcatccc

SEQ ID NO: 1089 - DNA, 23 bp, synthetic construct
  misc_feature 1..23: note = Description of Artificial Sequence: Synthetic primer
  source 1..23: mol_type = other DNA
agagaggagatgttgcttctagc

SEQ ID NO: 1090 - DNA, 20 bp, synthetic construct
  misc_feature 1..20: note = Description of Artificial Sequence: Synthetic primer
  source 1..20: mol_type = other DNA
aaggtcaaaacaggccgtgg

SEQ ID NO: 1091 - DNA, 22 bp, synthetic construct
  misc_feature 1..22: note = Description of Artificial Sequence: Synthetic primer
  source 1..22: mol_type = other DNA
agctcgtggatagagctaaacg

SEQ ID NO: 1092 - DNA, 23 bp, synthetic construct
  misc_feature 1..23: note = Description of Artificial Sequence: Synthetic primer
  source 1..23: mol_type = other DNA
ccatgttgatagatgacttgggc

SEQ ID NO: 1093 - DNA, 21 bp, synthetic construct
  misc_feature 1..21: note = Description of Artificial Sequence: Synthetic primer
  source 1..21: mol_type = other DNA
atgctaccccatccaatgtgc

SEQ ID NO: 1094 - DNA, 28 bp, synthetic construct
  misc_feature 1..28: note = Description of Artificial Sequence: Synthetic primer
  source 1..28: mol_type = other DNA
aatataatcgaaagaccaaatggagggc

SEQ ID NO: 1095 - DNA, 26 bp, synthetic construct
  misc_feature 1..26: note = Description of Artificial Sequence: Synthetic primer
  source 1..26: mol_type = other DNA
ttagttgagatggaaaactctttagc

SEQ ID NO: 1096 - DNA, 22 bp, synthetic construct
  misc_feature 1..22: note = Description of Artificial Sequence: Synthetic primer
  source 1..22: mol_type = other DNA
atagccatgttgacgtagaagc

SEQ ID NO: 1097 - DNA, 20 bp, synthetic construct
  misc_feature 1..20: note = Description of Artificial Sequence: Synthetic primer
  source 1..20: mol_type = other DNA
tcccacttcatcggaggacc

SEQ ID NO: 1098 - DNA, 23 bp, synthetic construct
  misc_feature 1..23: note = Description of Artificial Sequence: Synthetic primer
  source 1..23: mol_type = other DNA
ttggctaactcaagcaacatagg

SEQ ID NO: 1099 - DNA, 25 bp, synthetic construct
  misc_feature 1..25: note = Description of Artificial Sequence: Synthetic primer
  source 1..25: mol_type = other DNA
ggtggagacatactaaacttggaga

SEQ ID NO: 1100 - DNA, 25 bp, synthetic construct
  misc_feature 1..25: note = Description of Artificial Sequence: Synthetic primer
  source 1..25: mol_type = other DNA
gctttggtgaaaagctctaattcat

SEQ ID NO: 1101 - DNA, 27 bp, synthetic construct
  misc_feature 1..27: note = Description of Artificial Sequence: Synthetic primer
  source 1..27: mol_type = other DNA
atgagttaccagaatacatgaagatgc

SEQ ID NO: 1102 - DNA, 29 bp, synthetic construct
  misc_feature 1..29: note = Description of Artificial Sequence: Synthetic primer
  source 1..29: mol_type = other DNA
ggtattgaatgttgatggagatttcttgg

SEQ ID NO: 1103 - DNA, 26 bp, synthetic construct
  misc_feature 1..26: note = Description of Artificial Sequence: Synthetic primer
  source 1..26: mol_type = other DNA
ggtcgatatgtgtaaaagtttcttgc

SEQ ID NO: 1104 - DNA, 22 bp, synthetic construct
  misc_feature 1..22: note = Description of Artificial Sequence: Synthetic primer
  source 1..22: mol_type = other DNA
actggtgctcctactgaaatcc

SEQ ID NO: 1105 - DNA, 23 bp, synthetic construct
  misc_feature 1..23: note = Description of Artificial Sequence: Synthetic primer
  source 1..23: mol_type = other DNA
aatggttggatttcagtaggagc

SEQ ID NO: 1106 - DNA, 21 bp, synthetic construct
  misc_feature 1..21: note = Description of Artificial Sequence: Synthetic primer
  source 1..21: mol_type = other DNA
tggcactgtgacgaataatgg

SEQ ID NO: 1107 - DNA, 22 bp, synthetic construct
  misc_feature 1..22: note = Description of Artificial Sequence: Synthetic primer
  source 1..22: mol_type = other DNA
attgaaaagaggtgatgctccg

SEQ ID NO: 1108 - DNA, 29 bp, synthetic construct
  misc_feature 1..29: note = Description of Artificial Sequence: Synthetic primer
  source 1..29: mol_type = other DNA
ttggattgattatcttgagaactatgacc

SEQ ID NO: 1109 - DNA, 23 bp, synthetic construct
  misc_feature 1..23: note = Description of Artificial Sequence: Synthetic primer
  source 1..23: mol_type = other DNA
attgtatctgaagaggaagctcg

SEQ ID NO: 1110 - DNA, 28 bp, synthetic construct
  misc_feature 1..28: note = Description of Artificial Sequence: Synthetic primer
  source 1..28: mol_type = other DNA
tataagggaataggttcaataatcaagg

SEQ ID NO: 1111 - DNA, 22 bp, synthetic construct
  misc_feature 1..22: note = Description of Artificial Sequence: Synthetic primer
  source 1..22: mol_type = other DNA
atgtgctgtggtcaatagttct

SEQ ID NO: 1112 - DNA, 21 bp, synthetic construct
  misc_feature 1..21: note = Description of Artificial Sequence: Synthetic primer
  source 1..21: mol_type = other DNA
aaagaccaaatggagggctca

SEQ ID NO: 1113 - DNA, 22 bp, synthetic construct
  misc_feature 1..22: note = Description of Artificial Sequence: Synthetic primer
  source 1..22: mol_type = other DNA
acaggtcgagtcaaagaattgg

SEQ ID NO: 1114 - DNA, 20 bp, synthetic construct
  misc_feature 1..20: note = Description of Artificial Sequence: Synthetic primer
  source 1..20: mol_type = other DNA
gccatgttgacgtagaagcc

SEQ ID NO: 1115 - DNA, 21 bp, synthetic construct
  misc_feature 1..21: note = Description of Artificial Sequence: Synthetic primer
  source 1..21: mol_type = other DNA
ctcccacttcattggaggact

SEQ ID NO: 1116 - DNA, 24 bp, synthetic construct
  misc_feature 1..24: note = Description of Artificial Sequence: Synthetic primer
  source 1..24: mol_type = other DNA
agcaaactcaagcaaaataggatt

SEQ ID NO: 1117 - DNA, 20 bp, synthetic construct
  misc_feature 1..20: note = Description of Artificial Sequence: Synthetic primer
  source 1..20: mol_type = other DNA
gctaagtggttcatcgacgc

SEQ ID NO: 1118 - DNA, 25 bp, synthetic construct
  misc_feature 1..25: note = Description of Artificial Sequence: Synthetic primer
  source 1..25: mol_type = other DNA
tgatgtgttgattgtatcatgttga

SEQ ID NO: 1119 - DNA, 22 bp, synthetic construct
  misc_feature 1..22: note = Description of Artificial Sequence: Synthetic primer
  source 1..22: mol_type = other DNA
ggtggaggcatactaaacttgg

SEQ ID NO: 1120 - DNA, 27 bp, synthetic construct
  misc_feature 1..27: note = Description of Artificial Sequence: Synthetic primer
  source 1..27: mol_type = other DNA
gaaaagctctaattcatccaatgttcc

SEQ ID NO: 1121 - DNA, 27 bp, synthetic construct
  misc_feature 1..27: note = Description of Artificial Sequence: Synthetic primer
  source 1..27: mol_type = other DNA
gatgggatatggaaatgataaatgagt

SEQ ID NO: 1122 - DNA, 23 bp, synthetic construct
  misc_feature 1..23: note = Description of Artificial Sequence: Synthetic primer
  source 1..23: mol_type = other DNA
tgttgatggagatgtgttggtct

SEQ ID NO: 1123 - DNA, 19 bp, synthetic construct
  misc_feature 1..19: note = Description of Artificial Sequence: Synthetic primer
  source 1..19: mol_type = other DNA
gatttcagtgggagcaccg

SEQ ID NO: 1124 - DNA, 21 bp, synthetic construct
  misc_feature 1..21: note = Description of Artificial Sequence: Synthetic primer
  source 1..21: mol_type = other DNA
actatgacgaattatggcggg

SEQ ID NO: 1125 - DNA, 23 bp, synthetic construct
  misc_feature 1..23: note = Description of Artificial Sequence: Synthetic primer
  source 1..23: mol_type = other DNA
gaactgaaaagaggtgatgctcc

SEQ ID NO: 1126 - DNA, 30 bp, synthetic construct; identical to SEQ ID NO: 472
  misc_feature 1..30: note = Description of Artificial Sequence: Synthetic primer
  source 1..30: mol_type = other DNA

SEQ ID NO: 1127 - DNA, 21 bp, synthetic construct
  misc_feature 1..21: note = Description of Artificial Sequence: Synthetic primer
  source 1..21: mol_type = other DNA
atgctaccccatccaatgtgc

SEQ ID NO: 1128 - DNA, 28 bp, synthetic construct
  misc_feature 1..28: note = Description of Artificial Sequence: Synthetic primer
  source 1..28: mol_type = other DNA
aatataatcaaaagaccaaatggagggc

SEQ ID NO: 1129 - DNA, 25 bp, synthetic construct
  misc_feature 1..25: note = Description of Artificial Sequence: Synthetic primer
  source 1..25: mol_type = other DNA
caacttgaactcattgatacattgc

SEQ ID NO: 1130 - DNA, 22 bp, synthetic construct
  misc_feature 1..22: note = Description of Artificial Sequence: Synthetic primer
  source 1..22: mol_type = other DNA
tagccatgttgacgtagaagcc

SEQ ID NO: 1131 - DNA, 20 bp, synthetic construct
  misc_feature 1..20: note = Description of Artificial Sequence: Synthetic primer
  source 1..20: mol_type = other DNA
agctcccacttcatcggagg

SEQ ID NO: 1132 - DNA, 24 bp, synthetic construct
  misc_feature 1..24: note = Description of Artificial Sequence: Synthetic primer
  source 1..24: mol_type = other DNA
tttggctaactcaagcaacatagg

SEQ ID NO: 1133 - DNA, 25 bp, synthetic construct
  misc_feature 1..25: note = Description of Artificial Sequence: Synthetic primer
  source 1..25: mol_type = other DNA
ggtggagacatactaaacttggaga

SEQ ID NO: 1134 - DNA, 25 bp, synthetic construct
  misc_feature 1..25: note = Description of Artificial Sequence: Synthetic primer
  source 1..25: mol_type = other DNA
gctttggtgaaaagctctaattcat

SEQ ID NO: 1135 - DNA, 25 bp, synthetic construct
  misc_feature 1..25: note = Description of Artificial Sequence: Synthetic primer
  source 1..25: mol_type = other DNA
agttaccagaatacatgaagatgcc

SEQ ID NO: 1136 - DNA, 24 bp, synthetic construct
  misc_feature 1..24: note = Description of Artificial Sequence: Synthetic primer
  source 1..24: mol_type = other DNA
ttcttggtctcttaacacctcaaa

SEQ ID NO: 1137 - DNA, 26 bp, synthetic construct
  misc_feature 1..26: note = Description of Artificial Sequence: Synthetic primer
  source 1..26: mol_type = other DNA
ggtcgatatgtgtaaaagtttcttgc

SEQ ID NO: 1138 - DNA, 22 bp, synthetic construct
  misc_feature 1..22: note = Description of Artificial Sequence: Synthetic primer
  source 1..22: mol_type = other DNA
actggtgctcctactgaaatcc

SEQ ID NO: 1139 - DNA, 26 bp, synthetic construct
  misc_feature 1..26: note = Description of Artificial Sequence: Synthetic primer
  source 1..26: mol_type = other DNA
gaaaatggttggatttcagtaggagc

SEQ ID NO: 1140 - DNA, 22 bp, synthetic construct
  misc_feature 1..22: note = Description of Artificial Sequence: Synthetic primer
  source 1..22: mol_type = other DNA
tggcactgtgacgaataatggc

SEQ ID NO: 1141 - DNA, 23 bp, synthetic construct
  misc_feature 1..23: note = Description of Artificial Sequence: Synthetic primer
  source 1..23: mol_type = other DNA
aattgaaaagaggtgatgctccg

SEQ ID NO: 1142 - DNA, 30 bp, synthetic construct; identical to SEQ ID NO: 472
  misc_feature 1..30: note = Description of Artificial Sequence: Synthetic primer
  source 1..30: mol_type = other DNA

SEQ ID NO: 1143 - DNA, 23 bp, synthetic construct
  misc_feature 1..23: note = Description of Artificial Sequence: Synthetic primer
  source 1..23: mol_type = other DNA
agtcaagtgttagcttcatctca

SEQ ID NO: 1144 - DNA, 20 bp, synthetic construct
  misc_feature 1..20: note = Description of Artificial Sequence: Synthetic primer
  source 1..20: mol_type = other DNA
cgccccaaatagaagggtga

SEQ ID NO: 1145 - DNA, 25 bp, synthetic construct
  misc_feature 1..25: note = Description of Artificial Sequence: Synthetic primer
  source 1..25: mol_type = other DNA
gagagtgaaattgagaaattgttgg

SEQ ID NO: 1146 - DNA, 29 bp, synthetic construct
  misc_feature 1..29: note = Description of Artificial Sequence: Synthetic primer
  source 1..29: mol_type = other DNA
tgtcttaataatctaaaccaaagagaagc

SEQ ID NO: 1147 - DNA, 19 bp, synthetic construct
  misc_feature 1..19: note = Description of Artificial Sequence: Synthetic primer
  source 1..19: mol_type = other DNA
tgataaccgacgtttcggg

SEQ ID NO: 1148 - DNA, 22 bp, synthetic construct
  misc_feature 1..22: note = Description of Artificial Sequence: Synthetic primer
  source 1..22: mol_type = other DNA
ctagcatgaagcctctctaagg

SEQ ID NO: 1149 - DNA, 22 bp, synthetic construct
  misc_feature 1..22: note = Description of Artificial Sequence: Synthetic primer
  source 1..22: mol_type = other DNA
ggaaaggccactaagaatgacc

SEQ ID NO: 1150 - DNA, 23 bp, synthetic construct
  misc_feature 1..23: note = Description of Artificial Sequence: Synthetic primer
  source 1..23: mol_type = other DNA
acctcacaatttcactaagctcc

SEQ ID NO: 1151 - DNA, 21 bp, synthetic construct
  misc_feature 1..21: note = Description of Artificial Sequence: Synthetic primer
  source 1..21: mol_type = other DNA
gtggaaggagcatgagtttgc

SEQ ID NO: 1152 - DNA, 25 bp, synthetic construct
  misc_feature 1..25: note = Description of Artificial Sequence: Synthetic primer
  source 1..25: mol_type = other DNA
tgactttggttagaagttttcttgc

SEQ ID NO: 1153 - DNA, 26 bp, synthetic construct
  misc_feature 1..26: note = Description of Artificial Sequence: Synthetic primer
  source 1..26: mol_type = other DNA
gaagaagctcgatggttaaatgaagg

SEQ ID NO: 1154 - DNA, 25 bp, synthetic construct
  misc_feature 1..25: note = Description of Artificial Sequence: Synthetic primer
  source 1..25: mol_type = other DNA
agtagaagctgaaacaatcttaggg

SEQ ID NO: 1155 - DNA, 23 bp, synthetic construct
  misc_feature 1..23: note = Description of Artificial Sequence: Synthetic primer
  source 1..23: mol_type = other DNA
tctggttacgttttgttgatagc

SEQ ID NO: 1156 - DNA, 25 bp, synthetic construct
  misc_feature 1..25: note = Description of Artificial Sequence: Synthetic primer
  source 1..25: mol_type = other DNA
tgaatcttgagaggagagtagaagc

SEQ ID NO: 1157 - DNA, 24 bp, synthetic construct
  misc_feature 1..24: note = Description of Artificial Sequence: Synthetic primer
  source 1..24: mol_type = other DNA
tgaagcaatatgaggtttcagagg

SEQ ID NO: 1158 - DNA, 25 bp, synthetic construct
  misc_feature 1..25: note = Description of Artificial Sequence: Synthetic primer
  source 1..25: mol_type = other DNA
atgggatgggatctataagtaaagc

SEQ ID NO: 1159 - DNA, 29 bp, synthetic construct
  misc_feature 1..29: note = Description of Artificial Sequence: Synthetic primer
  source 1..29: mol_type = other DNA
aagtcttagcttcatctcaattatgtgac

SEQ ID NO: 1160 - DNA, 22 bp, synthetic construct
  misc_feature 1..22: note = Description of Artificial Sequence: Synthetic primer
  source 1..22: mol_type = other DNA
tcgatcaccccaaatagaaggg

SEQ ID NO: 1161 - DNA, 26 bp, synthetic construct
  misc_feature 1..26: note = Description of Artificial Sequence: Synthetic primer
  source 1..26: mol_type = other DNA
cgagagtgaaatcgagaaattattgg

SEQ ID NO: 1162 - DNA, 25 bp, synthetic construct
  misc_feature 1..25: note = Description of Artificial Sequence: Synthetic primer
  source 1..25: mol_type = other DNA
cactttgtcttaatagtctgaaccg

SEQ ID NO: 1163 - DNA, 19 bp, synthetic construct
  misc_feature 1..19: note = Description of Artificial Sequence: Synthetic primer
  source 1..19: mol_type = other DNA
agcttgtatgaggcttcgc

SEQ ID NO: 1164 - DNA, 24 bp, synthetic construct
  misc_feature 1..24: note = Description of Artificial Sequence: Synthetic primer
  source 1..24: mol_type = other DNA
tctctatggtctttcttaatggcg

SEQ ID NO: 1165 - DNA, 27 bp, synthetic construct
  misc_feature 1..27: note = Description of Artificial Sequence: Synthetic primer
  source 1..27: mol_type = other DNA
ggtggaactgtatttttggatattggg

SEQ ID NO: 1166 - DNA, 26 bp, synthetic construct
  misc_feature 1..26: note = Description of Artificial Sequence: Synthetic primer
  source 1..26: mol_type = other DNA
acctttgaattgctttggtaagaagc

SEQ ID NO: 1167 - DNA, 23 bp, synthetic construct
  misc_feature 1..23: note = Description of Artificial Sequence: Synthetic primer
  source 1..23: mol_type = other DNA
gaagctcgatggttgaatgaagg

SEQ ID NO: 1168 - DNA, 19 bp, synthetic construct
  misc_feature 1..19: note = Description of Artificial Sequence: Synthetic primer
  source 1..19: mol_type = other DNA
gcgagagcctatgtcatcc

SEQ ID NO: 1169 - DNA, 24 bp, synthetic construct
  misc_feature 1..24: note = Description of Artificial Sequence: Synthetic primer
  source 1..24: mol_type = other DNA
tgtggttacgttatgttgatagcc

SEQ ID NO: 1170 - DNA, 23 bp, synthetic construct
  misc_feature 1..23: note = Description of Artificial Sequence: Synthetic primer
  source 1..23: mol_type = other DNA
aatcttgataggagagtggaagc

SEQ ID NO: 1171 - DNA, 27 bp, synthetic construct
  misc_feature 1..27: note = Description of Artificial Sequence: Synthetic primer
  source 1..27: mol_type = other DNA
gtttgagcaagagagaaatcacatacc

SEQ ID NO: 1172 - DNA, 30 bp, synthetic construct
  misc_feature 1..30: note = Description of Artificial Sequence: Synthetic primer
  source 1..30: mol_type = other DNA
tgtaaaattaagaacacgaactaagatagg

SEQ ID NO: 1173 - DNA, 28 bp, synthetic construct
  misc_feature 1..28: note = Description of Artificial Sequence: Synthetic primer
  source 1..28: mol_type = other DNA
tcaagtcttagcttcatctcaattatgt

SEQ ID NO: 1174 - DNA, 21 bp, synthetic construct
  misc_feature 1..21: note = Description of Artificial Sequence: Synthetic primer
  source 1..21: mol_type = other DNA
tcgatcaccccaaatagaagg

SEQ ID NO: 1175 - DNA, 28 bp, synthetic construct
  misc_feature 1..28: note = Description of Artificial Sequence: Synthetic primer
  source 1..28: mol_type = other DNA
tttgagagtgaaattgagaaattgttgg

SEQ ID NO: 1176 - DNA, 30 bp, synthetic construct; identical to SEQ ID NO: 166
  misc_feature 1..30: note = Description of Artificial Sequence: Synthetic primer
  source 1..30: mol_type = other DNA

SEQ ID NO: 1177 - DNA, 27 bp, synthetic construct
  misc_feature 1..27: note = Description of Artificial Sequence: Synthetic primer
  source 1..27: mol_type = other DNA
gacgctgaaggtaattttaagaaaagc

SEQ ID NO: 1178 - DNA, 21 bp, synthetic construct
  misc_feature 1..21: note = Description of Artificial Sequence: Synthetic primer
  source 1..21: mol_type = other DNA
aaggtgagtggttgtgaaagc

SEQ ID NO: 1179 - DNA, 23 bp, synthetic construct
  misc_feature 1..23: note = Description of Artificial Sequence: Synthetic primer
  source 1..23: mol_type = other DNA
gcttcacacttgagttatgttgg

SEQ ID NO: 1180 - DNA, 24 bp, synthetic construct
  misc_feature 1..24: note = Description of Artificial Sequence: Synthetic primer
  source 1..24: mol_type = other DNA
ctctctatggtctttcttagaggc

SEQ ID NO: 1181 - DNA, 24 bp, synthetic construct
  misc_feature 1..24: note = Description of Artificial Sequence: Synthetic primer
  source 1..24: mol_type = other DNA
aggatggtggaactgtatttttgg

SEQ ID NO: 1182 - DNA, 25 bp, synthetic construct
  misc_feature 1..25: note = Description of Artificial Sequence: Synthetic primer
  source 1..25: mol_type = other DNA
cctttgaattgctttggtaagaagc

SEQ ID NO: 1183 - DNA, 26 bp, synthetic construct
  misc_feature 1..26: note = Description of Artificial Sequence: Synthetic primer
  source 1..26: mol_type = other DNA
gaagaagctcgatggttgaatgaagg

SEQ ID NO: 1184 - DNA, 26 bp, synthetic construct
  misc_feature 1..26: note = Description of Artificial Sequence: Synthetic primer
  source 1..26: mol_type = other DNA
agagtggaagctgaaacaatcttagg

SEQ ID NO: 1185 - DNA, 24 bp, synthetic construct
  misc_feature 1..24: note = Description of Artificial Sequence: Synthetic primer
  source 1..24: mol_type = other DNA
tgagcaacagagaaatcacatacc

SEQ ID NO: 1186 - DNA, 26 bp, synthetic construct
  misc_feature 1..26: note = Description of Artificial Sequence: Synthetic primer
  source 1..26: mol_type = other DNA
gaacacgaagtaagataggaaaaggc

SEQ ID NO: 1187 - DNA, 23 bp, synthetic construct
  misc_feature 1..23: note = Description of Artificial Sequence: Synthetic primer
  source 1..23: mol_type = other DNA
gtgccttttcctatcttacttcg

SEQ ID NO: 1188 - DNA, 25 bp, synthetic construct
  misc_feature 1..25: note = Description of Artificial Sequence: Synthetic primer
  source 1..25: mol_type = other DNA
caatgctttctttgagcacttttcc

SEQ ID NO: 1189 - DNA, 28 bp, synthetic construct
  misc_feature 1..28: note = Description of Artificial Sequence: Synthetic primer
  source 1..28: mol_type = other DNA
tttgagagtgaaattgagaaattgttgg

SEQ ID NO: 1190 - DNA, 30 bp, synthetic construct; identical to SEQ ID NO: 166
  misc_feature 1..30: note = Description of Artificial Sequence: Synthetic primer
  source 1..30: mol_type = other DNA

SEQ ID NO: 1191 - DNA, 22 bp, synthetic construct
  misc_feature 1..22: note = Description of Artificial Sequence: Synthetic primer
  source 1..22: mol_type = other DNA
gcttgataaccgatgtttcggg

SEQ ID NO: 1192 - DNA, 21 bp, synthetic construct
  misc_feature 1..21: note = Description of Artificial Sequence: Synthetic primer
  source 1..21: mol_type = other DNA
gaggtgagtggttgtgaaagc

SEQ ID NO: 1193 - DNA, 21 bp, synthetic construct
  misc_feature 1..21: note = Description of Artificial Sequence: Synthetic primer
  source 1..21: mol_type = other DNA
tcacctcaaggctattgtggc

SEQ ID NO: 1194 - DNA, 24 bp, synthetic construct
  misc_feature 1..24: note = Description of Artificial Sequence: Synthetic primer
  source 1..24: mol_type = other DNA
agatgtaaaacctagcatgaagcc

SEQ ID NO: 1195 - DNA, 22 bp, synthetic construct
  misc_feature 1..22: note = Description of Artificial Sequence: Synthetic primer
  source 1..22: mol_type = other DNA
ggtggaaggagcatgagtttgc

SEQ ID NO: 1196 - DNA, 24 bp, synthetic construct
  misc_feature 1..24: note = Description of Artificial Sequence: Synthetic primer
  source 1..24: mol_type = other DNA
ttgaggctaatgcaatgactttgg

SEQ ID NO: 1197 - DNA, 28 bp, synthetic construct
  misc_feature 1..28: note = Description of Artificial Sequence: Synthetic primer
  source 1..28: mol_type = other DNA
gggacataaattgtctggataaacttga

SEQ ID NO: 1198 - DNA, 30 bp, synthetic construct
  misc_feature 1..30: note = Description of Artificial Sequence: Synthetic primer
  source 1..30: mol_type = other DNA
tttttaagctccttttcaaattcttcataa

SEQ ID NO: 1199 - DNA, 21 bp, synthetic construct
  misc_feature 1..21: note = Description of Artificial Sequence: Synthetic primer
  source 1..21: mol_type = other DNA
agctcgatggttgagtgaagg

SEQ ID NO: 1200 - DNA, 22 bp, synthetic construct
  misc_feature 1..22: note = Description of Artificial Sequence: Synthetic primer
  source 1..22: mol_type = other DNA
acctagcaagtagagtggaagc

SEQ ID NO: 1201 - DNA, 24 bp, synthetic construct
  misc_feature 1..24: note = Description of Artificial Sequence: Synthetic primer
  source 1..24: mol_type = other DNA
tgagcaaaagagaaatcacatacc

SEQ ID NO: 1202 - DNA, 20 bp, synthetic construct
  misc_feature 1..20: note = Description of Artificial Sequence: Synthetic primer
  source 1..20: mol_type = other DNA
tttctttccagtgggtgtcc

SEQ ID NO: 1203 - DNA, 23 bp, synthetic construct
  misc_feature 1..23: note = Description of Artificial Sequence: Synthetic primer
  source 1..23: mol_type = other DNA
tatggggtatcagagaaagaggc

SEQ ID NO: 1204 - DNA, 26 bp, synthetic construct
  misc_feature 1..26: note = Description of Artificial Sequence: Synthetic primer
  source 1..26: mol_type = other DNA
gaacacgaactaagataggaaaaggc

SEQ ID NO: 1205 - DNA, 23 bp, synthetic construct
  misc_feature 1..23: note = Description of Artificial Sequence: Synthetic primer
  source 1..23: mol_type = other DNA
gtgccttttcctatcttagttcg

SEQ ID NO: 1206 - DNA, 25 bp, synthetic construct
  misc_feature 1..25: note = Description of Artificial Sequence: Synthetic primer
  source 1..25: mol_type = other DNA
caatgctttctttgagcacttttcc

SEQ ID NO: 1207 - DNA, 23 bp, synthetic construct
  misc_feature 1..23: note = Description of Artificial Sequence: Synthetic primer
  source 1..23: mol_type = other DNA
tccactcaaatcttagcaacctc

SEQ ID NO: 1208 - DNA, 20 bp, synthetic construct
  misc_feature 1..20: note = Description of Artificial Sequence: Synthetic primer
  source 1..20: mol_type = other DNA
tgcaaaaatcggtctcccca

SEQ ID NO: 1209 - DNA, 25 bp, synthetic construct
  misc_feature 1..25: note = Description of Artificial Sequence: Synthetic primer
  source 1..25: mol_type = other DNA
tgaagttaattgatgtggtagaacg

SEQ ID NO: 1210 - DNA, 24 bp, synthetic construct
  misc_feature 1..24: note = Description of Artificial Sequence: Synthetic primer
  source 1..24: mol_type = other DNA
agaaaccctatatccatgttgtcg

SEQ ID NO: 1211 - DNA, 25 bp, synthetic construct
  misc_feature 1..25: note = Description of Artificial Sequence: Synthetic primer
  source 1..25: mol_type = other DNA
caagttgaagaattgaaagaagtgg

SEQ ID NO: 1212 - DNA, 23 bp, synthetic construct
  misc_feature 1..23: note = Description of Artificial Sequence: Synthetic primer
  source 1..23: mol_type = other DNA
aaatgataggacaatcccaaacg

SEQ ID NO: 1213 - DNA, 19 bp, synthetic construct
  misc_feature 1..19: note = Description of Artificial Sequence: Synthetic primer
  source 1..19: mol_type = other DNA
gcgagtgacaccgttggtt

SEQ ID NO: 1214 - DNA, 24 bp, synthetic construct
  misc_feature 1..24: note = Description of Artificial Sequence: Synthetic primer
  source 1..24: mol_type = other DNA
tggatcatcattggggtgttcttt

SEQ ID NO: 1215 - DNA, 23 bp, synthetic construct
  misc_feature 1..23: note = Description of Artificial Sequence: Synthetic primer
  source 1..23: mol_type = other DNA
aaagaacaccccaatgatgatcc

SEQ ID NO: 1216 - DNA, 20 bp, synthetic construct
  misc_feature 1..20: note = Description of Artificial Sequence: Synthetic primer
  source 1..20: mol_type = other DNA
gggtctttcttaagggcctc

SEQ ID NO: 1217 - DNA, 23 bp, synthetic construct
  misc_feature 1..23: note = Description of Artificial Sequence: Synthetic primer
  source 1..23: mol_type = other DNA
tggtggaaggaattagacagtgc

SEQ ID NO: 1218 - DNA, 21 bp, synthetic construct
  misc_feature 1..21: note = Description of Artificial Sequence: Synthetic primer
  source 1..21: mol_type = other DNA
atcagcgattgaggaaagtgc

SEQ ID NO: 1219 - DNA, 25 bp, synthetic construct
  misc_feature 1..25: note = Description of Artificial Sequence: Synthetic primer
  source 1..25: mol_type = other DNA
gataaactccatccagaatacttgc

SEQ ID NO: 1220 - DNA, 25 bp, synthetic construct
  misc_feature 1..25: note = Description of Artificial Sequence: Synthetic primer
  source 1..25: mol_type = other DNA
actttgtaagtttcctccttttcaa

SEQ ID NO: 1221 - DNA, 23 bp, synthetic construct
  misc_feature 1..23: note = Description of Artificial Sequence: Synthetic primer
  source 1..23: mol_type = other DNA
gaagctcgatggttgaatgaagg

SEQ ID NO: 1222 - DNA, 21 bp, synthetic construct
  misc_feature 1..21: note = Description of Artificial Sequence: Synthetic primer
  source 1..21: mol_type = other DNA
cgcttgccctaacaatcttgg

SEQ ID NO: 1223 - DNA, 24 bp, synthetic construct
  misc_feature 1..24: note = Description of Artificial Sequence: Synthetic primer
  source 1..24: mol_type = other DNA
gttgatggcttgctctttagttgg

SEQ ID NO: 1224 - DNA, 20 bp, synthetic construct
  misc_feature 1..20: note = Description of Artificial Sequence: Synthetic primer
  source 1..20: mol_type = other DNA
tgtgaccagccacgtcatcc

SEQ ID NO: 1225 - DNA, 25 bp, synthetic construct
  misc_feature 1..25: note = Description of Artificial Sequence: Synthetic primer
  source 1..25: mol_type = other DNA
tgtgatgaaatgaataggcgagtgg

SEQ ID NO: 1226 - DNA, 25 bp, synthetic construct
  misc_feature 1..25: note = Description of Artificial Sequence: Synthetic primer
  source 1..25: mol_type = other DNA
ccataaccctagcaagattcagagc

SEQ ID NO: 1227 - DNA, 24 bp, synthetic construct
  misc_feature 1..24: note = Description of Artificial Sequence: Synthetic primer
  source 1..24: mol_type = other DNA
tcaagttttagcctcatcacaaaa

SEQ ID NO: 1228 - DNA, 25 bp, synthetic construct
  misc_feature 1..25: note = Description of Artificial Sequence: Synthetic primer
  source 1..25: mol_type = other DNA
cccaaatagaaggttgataagttgt

SEQ ID NO: 1229 - DNA, 23 bp, synthetic construct
  misc_feature 1..23: note = Description of Artificial Sequence: Synthetic primer
  source 1..23: mol_type = other DNA
gcagcgagttgacgaattaaagg

SEQ ID NO: 1230 - DNA, 23 bp, synthetic construct
  misc_feature 1..23: note = Description of Artificial Sequence: Synthetic primer
  source 1..23: mol_type = other DNA
tgaaaccataaatccatgttggc

SEQ ID NO: 1231 - DNA, 22 bp, synthetic construct
  misc_feature 1..22: note = Description of Artificial Sequence: Synthetic primer
  source 1..22: mol_type = other DNA
tgcttgataactgacattcccg

SEQ ID NO: 1232 - DNA, 21 bp, synthetic construct
  misc_feature 1..21: note = Description of Artificial Sequence: Synthetic primer
  source 1..21: mol_type = other DNA
aaggtgagtggtggtgaaagc

SEQ ID NO: 1233 - DNA, 23 bp, synthetic construct
  misc_feature 1..23: note = Description of Artificial Sequence: Synthetic primer
  source 1..23: mol_type = other DNA
agtgcttgataactgacattccc

SEQ ID NO: 1234 - DNA, 23 bp, synthetic construct
  misc_feature 1..23: note = Description of Artificial Sequence: Synthetic primer
  source 1..23: mol_type = other DNA
atgaaatgtaatgcctagcgtgg

SEQ ID NO: 1235 - DNA, 23 bp, synthetic construct
  misc_feature 1..23: note = Description of Artificial Sequence: Synthetic primer
  source 1..23: mol_type = other DNA
tgcaagagataggattgtggagc

SEQ ID NO: 1236 - DNA, 20 bp, synthetic construct
  misc_feature 1..20: note = Description of Artificial Sequence: Synthetic primer
  source 1..20: mol_type = other DNA
tctgcaactgaggccaatgc

SEQ ID NO: 1237 - DNA, 25 bp, synthetic construct
  misc_feature 1..25: note = Description of Artificial Sequence: Synthetic primer
  source 1..25: mol_type = other DNA
acttaaattgtgcggatcaactacg

SEQ ID NO: 1238 - DNA, 27 bp, synthetic construct
  misc_feature 1..27: note = Description of Artificial Sequence: Synthetic primer
  source 1..27: mol_type = other DNA
gtaaactttgtaactttcctcctttcc

SEQ ID NO: 1239 - DNA, 21 bp, synthetic construct
  misc_feature 1..21: note = Description of Artificial Sequence: Synthetic primer
  source 1..21: mol_type = other DNA
tcagtgaagctcgatggttgc

SEQ ID NO: 1240 - DNA, 23 bp, synthetic construct
  misc_feature 1..23: note = Description of Artificial Sequence: Synthetic primer
  source 1..23: mol_type = other DNA
tgcaatctctcattatcttgggg

SEQ ID NO: 1241 - DNA, 21 bp, synthetic construct
  misc_feature 1..21: note = Description of Artificial Sequence: Synthetic primer
  source 1..21: mol_type = other DNA
gagatcattcaccgtctaccg

SEQ ID NO: 1242 - DNA, 24 bp, synthetic construct
  misc_feature 1..24: note = Description of Artificial Sequence: Synthetic primer
  source 1..24: mol_type = other DNA
tttttgtctcttttccaacatgcg

SEQ ID NO: 1243 - DNA, 23 bp, synthetic construct
  misc_feature 1..23: note = Description of Artificial Sequence: Synthetic primer
  source 1..23: mol_type = other DNA
tgtcgtctcaaatcttagcaacc

SEQ ID NO: 1244 - DNA, 20 bp, synthetic construct
  misc_feature 1..20: note = Description of Artificial Sequence: Synthetic primer
  source 1..20: mol_type = other DNA
atgcaaaaatcggtctcccc

SEQ ID NO: 1245 - DNA, 27 bp, synthetic construct
  misc_feature 1..27: note = Description of Artificial Sequence: Synthetic primer
  source 1..27: mol_type = other DNA
gccaagttgaagaattgaaagaagtgg

SEQ ID NO: 1246 - DNA, 25 bp, synthetic construct
  misc_feature 1..25: note = Description of Artificial Sequence: Synthetic primer
  source 1..25: mol_type = other DNA
actctcaaaatgataggacaatccc

SEQ ID NO: 1247 - DNA, 27 bp, synthetic construct
  misc_feature 1..27: note = Description of Artificial Sequence: Synthetic primer
  source 1..27: mol_type = other DNA
agaagtggtaagaaaggagatatttgg

SEQ ID NO: 1248 - DNA, 25 bp, synthetic construct
  misc_feature 1..25: note = Description of Artificial Sequence: Synthetic primer
  source 1..25: mol_type = other DNA
aagaaaccctatatccatgttgtcg

SEQ ID NO: 1249 - DNA, 21 bp, synthetic construct
  misc_feature 1..21: note = Description of Artificial Sequence: Synthetic primer
  source 1..21: mol_type = other DNA
gaatgtttggcgagtgacacc

SEQ ID NO: 1250 - DNA, 20 bp, synthetic construct
  misc_feature 1..20: note = Description of Artificial Sequence: Synthetic primer
  source 1..20: mol_type = other DNA
aagggcctctctagggctcg

SEQ ID NO: 1251 - DNA, 22 bp, synthetic construct
  misc_feature 1..22: note = Description of Artificial Sequence: Synthetic primer
  source 1..22: mol_type = other DNA
aagaacaccccaatgatgatcc

SEQ ID NO: 1252 - DNA, 23 bp, synthetic construct
  misc_feature 1..23: note = Description of Artificial Sequence: Synthetic primer
  source 1..23: mol_type = other DNA
actaagctcctttttgtgcatgg

SEQ ID NO: 1253 - DNA, 23 bp, synthetic construct
  misc_feature 1..23: note = Description of Artificial Sequence: Synthetic primer
  source 1..23: mol_type = other DNA
tggtggaaggaattagacagtgc

SEQ ID NO: 1254 - DNA, 21 bp, synthetic construct
  misc_feature 1..21: note = Description of Artificial Sequence: Synthetic primer
  source 1..21: mol_type = other DNA
atcagcgattgaggaaagtgc

SEQ ID NO: 1255 - DNA, 24 bp, synthetic construct
  misc_feature 1..24: note = Description of Artificial Sequence: Synthetic primer
  source 1..24: mol_type = other DNA
ttatgaaccccaatactcttttgc

SEQ ID NO: 1256 - DNA, 26 bp, synthetic construct
  misc_feature 1..26: note = Description of Artificial Sequence: Synthetic primer
  source 1..26: mol_type = other DNA
aggagcttatgttcttcaaatatacc

SEQ ID NO: 1257 - DNA, 26 bp, synthetic construct
  misc_feature 1..26: note = Description of Artificial Sequence: Synthetic primer
  source 1..26: mol_type = other DNA
ggataaactccatccagaatacttgc

SEQ ID NO: 1258 - DNA, 27 bp, synthetic construct
  misc_feature 1..27: note = Description of Artificial Sequence: Synthetic primer
  source 1..27: mol_type = other DNA
tcttgttcaaattcctcaaaagattgc

SEQ ID NO: 1259 - DNA, 23 bp, synthetic construct
  misc_feature 1..23: note = Description of Artificial Sequence: Synthetic primer
  source 1..23: mol_type = other DNA
gaagctcgatggttgaatgaagg

SEQ ID NO: 1260 - DNA, 21 bp, synthetic construct
  misc_feature 1..21: note = Description of Artificial Sequence: Synthetic primer
  source 1..21: mol_type = other DNA
cgcttgccctaacaatcttgg

SEQ ID NO: 1261 - DNA, 22 bp, synthetic construct
  misc_feature 1..22: note = Description of Artificial Sequence: Synthetic primer
  source 1..22: mol_type = other DNA
tgatggcttgctctttagttgg

SEQ ID NO: 1262 - DNA, 20 bp, synthetic construct
  misc_feature 1..20: note = Description of Artificial Sequence: Synthetic primer
  source 1..20: mol_type = other DNA
agccacgtcatccatgtacc

SEQ ID NO: 1263 - DNA, 28 bp, synthetic construct
  misc_feature 1..28: note = Description of Artificial Sequence: Synthetic primer
  source 1..28: mol_type = other DNA
agaatgagcaagagagaaatcatatacc

SEQ ID NO: 1264 - DNA, 20 bp, synthetic construct
  misc_feature 1..20: note = Description of Artificial Sequence: Synthetic primer
  source 1..20: mol_type = other DNA
ccatgcaataaccactcgcc

SEQ ID NO: 1265 - DNA, 22 bp, synthetic construct
  misc_feature 1..22: note = Description of Artificial Sequence: Synthetic primer
  source 1..22: mol_type = other DNA
taggcgagtggttattgcatgg

SEQ ID NO: 1266 - DNA, 21 bp, synthetic construct
  misc_feature 1..21: note = Description of Artificial Sequence: Synthetic primer
  source 1..21: mol_type = other DNA
cctagcaagattcagagcacg

SEQ ID NO: 1267 - DNA, 30 bp, synthetic construct
  misc_feature 1..30: note = Description of Artificial Sequence: Synthetic primer
  source 1..30: mol_type = other DNA
aaaatgagaaaatacataaaattgttcgac

SEQ ID NO: 1268 - DNA, 22 bp, synthetic construct
  misc_feature 1..22: note = Description of Artificial Sequence: Synthetic primer
  source 1..22: mol_type = other DNA
tcgatctccccaaatagatgga

SEQ ID NO: 1269 - DNA, 30 bp, synthetic construct
  misc_feature 1..30: note = Description of Artificial Sequence: Synthetic primer
  source 1..30: mol_type = other DNA
ttgaagaattgaaagaagtagtaagaaagg

SEQ ID NO: 1270 - DNA, 26 bp, synthetic construct
  misc_feature 1..26: note = Description of Artificial Sequence: Synthetic primer
  source 1..26: mol_type = other DNA
tcaaaatgataggacaatcccaaacg

SEQ ID NO: 1271 - DNA, 25 bp, synthetic construct
  misc_feature 1..25: note = Description of Artificial Sequence: Synthetic primer
  source 1..25: mol_type = other DNA
tgacaagttcaaagatgagaatggc

SEQ ID NO: 1272 - DNA, 20 bp, synthetic construct
  misc_feature 1..20: note = Description of Artificial Sequence: Synthetic primer
  source 1..20: mol_type = other DNA
tagtaaatcttccccgacgc

SEQ ID NO: 1273 - DNA, 20 bp, synthetic construct
  misc_feature 1..20: note = Description of Artificial Sequence: Synthetic primer
  source 1..20: mol_type = other DNA
acatttgagttgcgtcgggg

SEQ ID NO: 1274 - DNA, 21 bp, synthetic construct
  misc_feature 1..21: note = Description of Artificial Sequence: Synthetic primer
  source 1..21: mol_type = other DNA
tagcttggagcctgtttaggg

SEQ ID NO: 1275 - DNA, 23 bp, synthetic construct
  misc_feature 1..23: note = Description of Artificial Sequence: Synthetic primer
  source 1..23: mol_type = other DNA
aagaaaaaccctaaacaggctcc

SEQ ID NO: 1276 - DNA, 22 bp, synthetic construct
  misc_feature 1..22: note = Description of Artificial Sequence: Synthetic primer
  source 1..22: mol_type = other DNA
ctaagctcctttttgtgcatgg

SEQ ID NO: 1277 - DNA, 25 bp, synthetic construct
  misc_feature 1..25: note = Description of Artificial Sequence: Synthetic primer
  source 1..25: mol_type = other DNA
agagacaggagtgtggaactatacc

SEQ ID NO: 1278 - DNA, 24 bp, synthetic construct
  misc_feature 1..24: note = Description of Artificial Sequence: Synthetic primer
  source 1..24: mol_type = other DNA
tgtcatcagctattgtggcaaagg

SEQ ID NO: 1279 - DNA, 23 bp, synthetic construct
  misc_feature 1..23: note = Description of Artificial Sequence: Synthetic primer
  source 1..23: mol_type = other DNA
tgaagaatttgagcaagggctta

SEQ ID NO: 1280 - DNA, 24 bp, synthetic construct
  misc_feature 1..24: note = Description of Artificial Sequence: Synthetic primer
  source 1..24: mol_type = other DNA
gcgtaatgaactctgtaagtttct

SEQ ID NO: 1281 - DNA, 22 bp, synthetic construct
  misc_feature 1..22: note = Description of Artificial Sequence: Synthetic primer
  source 1..22: mol_type = other DNA
gtggttaaagaaagctgaacgc

SEQ ID NO: 1282 - DNA, 22 bp, synthetic construct
  misc_feature 1..22: note = Description of Artificial Sequence: Synthetic primer
  source 1..22: mol_type = other DNA
gccgacaaatagtagtggatgc

SEQ ID NO: 1283 - DNA, 22 bp, synthetic construct
  misc_feature 1..22: note = Description of Artificial Sequence: Synthetic primer
  source 1..22: mol_type = other DNA
tgaataggcgagtggttattgc

SEQ ID NO: 1284 - DNA, 18 bp, synthetic construct
  misc_feature 1..18: note = Description of Artificial Sequence: Synthetic primer
  source 1..18: mol_type = other DNA
tgcaagattcagggcacg

SEQ ID NO: 1285 - DNA, 18 bp, synthetic construct
  misc_feature 1..18: note = Description of Artificial Sequence: Synthetic primer
  source 1..18: mol_type = other DNA
tcagttgggggaccaatt

SEQ ID NO: 1286 - DNA, 19 bp, synthetic construct
  misc_feature 1..19: note = Description of Artificial Sequence: Synthetic primer
  source 1..19: mol_type = other DNA
catccgacgatgttcctag

SEQ ID NO: 1287 - DNA, 62 bp, synthetic construct
  misc_feature 1..62: note = Description of Artificial Sequence: Synthetic primer
  source 1..62: mol_type = other DNA
  misc_difference 26..40: note = This region may encompass 3-15 nucleotides or may be absent
ggatcatcataaccttcttccaagattttttttttttttttcttttgcatgcttattttgct

SEQ ID NO: 1288 - DNA, 62 bp, synthetic construct
  misc_feature 1..62: note = Description of Artificial Sequence: Synthetic primer
  source 1..62: mol_type = other DNA
  misc_difference 26..40: note = This region may encompass 3-15 nucleotides or may be absent
tgaaggatccctggaaatatcaaatttttttttttttttttcttcaagtcgtaaaagtatgg

SEQ ID NO: 1289 - DNA, 22 bp, synthetic construct
  misc_feature 1..22: note = Description of Artificial Sequence: Synthetic primer
  source 1..22: mol_type = other DNA
tcttttgcatgcttattttgct

SEQ ID NO: 1290 - DNA, 25 bp, synthetic construct
  misc_feature 1..25: note = Description of Artificial Sequence: Synthetic primer
  source 1..25: mol_type = other DNA
ggatcatcataaccttcttccaaga

SEQ ID NO: 1291 - DNA, 22 bp, synthetic construct
  misc_feature 1..22: note = Description of Artificial Sequence: Synthetic primer
  source 1..22: mol_type = other DNA
tcttcaagtcgtaaaagtatgg

SEQ ID NO: 1292 - DNA, 25 bp, synthetic construct
  misc_feature 1..25: note = Description of Artificial Sequence: Synthetic primer
  source 1..25: mol_type = other DNA
tgaaggatccctggaaatatcaaat

SEQ ID NO: 1293 - DNA, 25 bp, synthetic construct
  misc_feature 1..25: note = Description of Artificial Sequence: Synthetic primer
  source 1..25: mol_type = other DNA
ggaagctttttctaagggatttgtg

SEQ ID NO: 1294 - DNA, 25 bp, synthetic construct
  misc_feature 1..25: note = Description of Artificial Sequence: Synthetic primer
  source 1..25: mol_type = other DNA
ccttccataaatattcatgaaggat

SEQ ID NO: 1295 - DNA, 18 bp, synthetic construct
  misc_feature 1..18: note = Description of Artificial Sequence: Synthetic primer
  source 1..18: mol_type = other DNA
aaatttgatgtgctcgcg

SEQ ID NO: 1296 - DNA, 62 bp, synthetic construct
  misc_feature 1..62: note = Description of Artificial Sequence: Synthetic primer
  source 1..62: mol_type = other DNA
  misc_difference 26..40: note = This region may encompass 3-15 nucleotides or may be absent
tcaagtcgtaaaagtatggatccaatttttttttttttttcctggaaatatcaaatgatggt

SEQ ID NO: 1297 - DNA, 58 bp, synthetic construct
  misc_feature 1..58: note = Description of Artificial Sequence: Synthetic primer
  source 1..58: mol_type = other DNA
  misc_difference 23..37: note = This region may encompass 3-15 nucleotides or may be absent
ctaggaacatcgtcggatgagatttttttttttttttcagaaacacctgtatcattca

SEQ ID NO: 1298 - DNA, 22 bp, synthetic construct
  misc_feature 1..22: note = Description of Artificial Sequence: Synthetic primer
  source 1..22: mol_type = other DNA
cctggaaatatcaaatgatggt

SEQ ID NO: 1299 - DNA, 25 bp, synthetic construct
  misc_feature 1..25: note = Description of Artificial Sequence: Synthetic primer
  source 1..25: mol_type = other DNA
tcaagtcgtaaaagtatggatccaa

SEQ ID NO: 1300 - DNA, 21 bp, synthetic construct
  misc_feature 1..21: note = Description of Artificial Sequence: Synthetic primer
  source 1..21: mol_type = other DNA
cagaaacacctgtatcattca

SEQ ID NO: 1301 - DNA, 22 bp, synthetic construct
  misc_feature 1..22: note = Description of Artificial Sequence: Synthetic primer
  source 1..22: mol_type = other DNA
ctaggaacatcgtcggatgaga

SEQ ID NO: 1302 - DNA, 25 bp, synthetic construct
  misc_feature 1..25: note = Description of Artificial Sequence: Synthetic primer
  source 1..25: mol_type = other DNA
agaggagatgttccgaaatcaattc

SEQ ID NO: 1303 - DNA, 22 bp, synthetic construct
  misc_feature 1..22: note = Description of Artificial Sequence: Synthetic primer
  source 1..22: mol_type = other DNA
tcttggaagaaggttatgatga

SEQ ID NO: 1304 - DNA, 18 bp, synthetic construct
  misc_feature 1..18: note = Description of Artificial Sequence: Synthetic primer
  source 1..18: mol_type = other DNA
aaatttgatgtgctcgcg

SEQ ID NO: 1305 - DNA, 63 bp, synthetic construct
  misc_feature 1..63: note = Description of Artificial Sequence: Synthetic primer
  source 1..63: mol_type = other DNA
  misc_difference 26..40: note = This region may encompass 3-15 nucleotides or may be absent
tcaagtcgtaaaagtatggatccaattttttttttttttttaaatattcatgaaggatccctg

SEQ ID NO: 1306 - DNA, 58 bp, synthetic construct; identical to SEQ ID NO: 1297
  misc_feature 1..58: note = Description of Artificial Sequence: Synthetic primer
  source 1..58: mol_type = other DNA
  misc_difference 23..37: note = This region may encompass 3-15 nucleotides or may be absent

SEQ ID NO: 1307 - DNA, 23 bp, synthetic construct
  misc_feature 1..23: note = Description of Artificial Sequence: Synthetic primer
  source 1..23: mol_type = other DNA
taaatattcatgaaggatccctg

SEQ ID NO: 1308 - DNA, 25 bp, synthetic construct
  misc_feature 1..25: note = Description of Artificial Sequence: Synthetic primer
  source 1..25: mol_type = other DNA
tcaagtcgtaaaagtatggatccaa

SEQ ID NO: 1309 - DNA, 21 bp, synthetic construct
  misc_feature 1..21: note = Description of Artificial Sequence: Synthetic primer
  source 1..21: mol_type = other DNA
cagaaacacctgtatcattca

SEQ ID NO: 1310 - DNA, 22 bp, synthetic construct
  misc_feature 1..22: note = Description of Artificial Sequence: Synthetic primer
  source 1..22: mol_type = other DNA
ctaggaacatcgtcggatgaga

SEQ ID NO: 1311 - DNA, 25 bp, synthetic construct
  misc_feature 1..25: note = Description of Artificial Sequence: Synthetic primer
  source 1..25: mol_type = other DNA
agaggagatgttccgaaatcaattc

SEQ ID NO: 1312 - DNA, 21 bp, synthetic construct
  misc_feature 1..21: note = Description of Artificial Sequence: Synthetic primer
  source 1..21: mol_type = other DNA
gggaccaattattcttttgca

SEQ ID NO: 1313 - DNA, 19 bp, synthetic construct
  misc_feature 1..19: note = Description of Artificial Sequence: Synthetic primer
  source 1..19: mol_type = other DNA
catccgacgatgttcctag

SEQ ID NO: 1314 - DNA, 63 bp, synthetic construct
  misc_feature 1..63: note = Description of Artificial Sequence: Synthetic primer
  source 1..63: mol_type = other DNA
  misc_difference 26..40: note = This region may encompass 3-15 nucleotides or may be absent
ggatcatcataaccttcttccaagatttttttttttttttgcttattttgctttcacaaatcc

SEQ ID NO: 1315 - DNA, 62 bp, synthetic construct
  misc_feature 1..62: note = Description of Artificial Sequence: Synthetic primer
  source 1..62: mol_type = other DNA
  misc_difference 26..40: note = This region may encompass 3-15 nucleotides or may be absent
atgaaggatccctggaaatatcaaattttttttttttttttcttcaagtcgtaaaagtatgg

SEQ ID NO: 1316 - DNA, 23 bp, synthetic construct
  misc_feature 1..23: note = Description of Artificial Sequence: Synthetic primer
  source 1..23: mol_type = other DNA
gcttattttgctttcacaaatcc

SEQ ID NO: 1317 - DNA, 25 bp, synthetic construct
  misc_feature 1..25: note = Description of Artificial Sequence: Synthetic primer
  source 1..25: mol_type = other DNA
ggatcatcataaccttcttccaaga

SEQ ID NO: 1318 - DNA, 22 bp, synthetic construct
  misc_feature 1..22: note = Description of Artificial Sequence: Synthetic primer
  source 1..22: mol_type = other DNA
tcttcaagtcgtaaaagtatgg

SEQ ID NO: 1319 - DNA, 25 bp, synthetic construct
  misc_feature 1..25: note = Description of Artificial Sequence: Synthetic primer
  source 1..25: mol_type = other DNA
atgaaggatccctggaaatatcaaa

SEQ ID NO: 1320 - DNA, 21 bp, synthetic construct
  misc_feature 1..21: note = Description of Artificial Sequence: Synthetic primer
  source 1..21: mol_type = other DNA
acaaatcccttagaaaaagct

SEQ ID NO: 1321 - DNA, 22 bp, synthetic construct
  misc_feature 1..22: note = Description of Artificial Sequence: Synthetic primer
  source 1..22: mol_type = other DNA
catctcctcttttcatctcatc

SEQ ID NO: 1322 - DNA, 64 bp, synthetic construct
  misc_feature 1..64: note = Description of Artificial Sequence: Synthetic primer
  source 1..64: mol_type = other DNA
  misc_difference 26..40: note = This region may encompass 3-15 nucleotides or may be absent
ttccagggatccttcatgaatattttttttttttttttttccataaaattcttggaagaaggtt

SEQ ID NO: 1323 - DNA, 59 bp, synthetic construct
  misc_feature 1..59: note = Description of Artificial Sequence: Synthetic primer
  source 1..59: mol_type = other DNA
  misc_difference 26..40: note = This region may encompass 3-15 nucleotides or may be absent
accctaccatatttcatcttggatctttttttttttttttcgacgatgttcctaggtca

SEQ ID NO: 1324 - DNA, 24 bp, synthetic construct
  misc_feature 1..24: note = Description of Artificial Sequence: Synthetic primer
  source 1..24: mol_type = other DNA
ccataaaattcttggaagaaggtt

SEQ ID NO: 1325 - DNA, 25 bp, synthetic construct
  misc_feature 1..25: note = Description of Artificial Sequence: Synthetic primer
  source 1..25: mol_type = other DNA
ttccagggatccttcatgaatattt

SEQ ID NO: 1326 - DNA, 19 bp, synthetic construct
  misc_feature 1..19: note = Description of Artificial Sequence: Synthetic primer
  source 1..19: mol_type = other DNA
cgacgatgttcctaggtca

SEQ ID NO: 1327 - DNA, 25 bp, synthetic construct
  misc_feature 1..25: note = Description of Artificial Sequence: Synthetic primer
  source 1..25: mol_type = other DNA
accctaccatatttcatcttggatc

SEQ ID NO: 1328 - DNA, 19 bp, synthetic construct
  misc_feature 1..19: note = Description of Artificial Sequence: Synthetic primer
  source 1..19: mol_type = other DNA
atgcagtgcatggcttttc

SEQ ID NO: 1329 - DNA, 30 bp, synthetic construct
  misc_feature 1..30: note = Description of Artificial Sequence: Synthetic primer
  source 1..30: mol_type = other DNA
ttacatgggaatagggttaataatcaaatc

SEQ ID NO: 1330 - DNA, 20 bp, synthetic construct
  misc_feature 1..20: note = Description of Artificial Sequence: Synthetic primer
  source 1..20: mol_type = other DNA
atgtcatatcaagttttagc

SEQ ID NO: 1331 - DNA, 23 bp, synthetic construct
  misc_feature 1..23: note = Description of Artificial Sequence: Synthetic primer
  source 1..23: mol_type = other DNA
tgggatttgatctataagtaacg

SEQ ID NO: 1332 - DNA, 23 bp, synthetic construct
  misc_feature 1..23: note = Description of Artificial Sequence: Synthetic primer
  source 1..23: mol_type = other DNA
cgggatttgatctataagtaacg

SEQ ID NO: 1333 - DNA, 20 bp, synthetic construct
  misc_feature 1..20: note = Description of Artificial Sequence: Synthetic primer
  source 1..20: mol_type = other DNA
atgtctagtcaagtgttagc

SEQ ID NO: 1334 - DNA, 22 bp, synthetic construct
  misc_feature 1..22: note = Description of Artificial Sequence: Synthetic primer
  source 1..22: mol_type = other DNA
taatgggatgggatctataagc

SEQ ID NO: 1335 - DNA, 23 bp, synthetic construct
  misc_feature 1..23: note = Description of Artificial Sequence: Synthetic primer
  source 1..23: mol_type = other DNA
atgtcaaatattcaagtcttagc

SEQ ID NO: 1336 - DNA, 22 bp, synthetic construct
  misc_feature 1..22: note = Description of Artificial Sequence: Synthetic primer
  source 1..22: mol_type = other DNA
taatgggatgggatctataagc

SEQ ID NO: 1337 - DNA, 23 bp, synthetic construct
  misc_feature 1..23: note = Description of Artificial Sequence: Synthetic primer
  source 1..23: mol_type = other DNA
actgtggtcgataaccctagttc

SEQ ID NO: 1338 - DNA, 27 bp, synthetic construct
  misc_feature 1..27: note = Description of Artificial Sequence: Synthetic primer
  source 1..27: mol_type = other DNA
catgggaatagggttaataatcaaatc

SEQ ID NO: 1339 - DNA, 1677 bp, synthetic construct
  misc_feature 1..1677: note = Description of Artificial Sequence: Synthetic polynucleotide
  source 1..1677: mol_type = other DNA
atgttcacacaaatcttagtatcttcaaatgacaacccaaatataattgttcgtcctacaaaaaaattccacccaaatatttggggagaacgattcttacattacaacatttcacaacaagatttgtattgtcaacaacaaaaggttgaggaattaaaagaagtggttagaagagaaatatttggagattattattatgatgcttggaaaaatcaattgaagataattgatgtggtagaacgtttgggattgtcttatcattttgaaactgaaatagaaaataagcttcaatgcatttacaacaaaactaatattattgatgatgaagatttacaccatgtttctattcgatttagacttctacgacaacatggatttagaatttcttctgatatatttgaaaaattcaaagacgaggatgggaactttaaaaaatgcttggtaagtgatacctttggtttgcttagcttatatgaagcctcacatttgagttgtgttggagaaaatatacttgatgaagcacttgctttcacaacaacacacctaaatgagtttttggtgaagaaaaaagaacaccatgaagacgatgatccattatcgaaagaaatatctcgagccctagagaggcccttaagaaagaccctagtaaatcttcatgcaaggcatttcatttcgatatatgaaaaagatgcctcacataacaaagtattgttacaacttgcaaaattagatttcaatctattacaatgcatgcataaaaaggaacttagtgaagtcagcaggtggtggaaagaatcagattttgtacacaaatttccatttgcaagagataggattgtggaattatacctttggatattaggagtttattatgaaccccaatattgtttggcaagaaatattttagtcaaaatcatagctttggcctcaattgcggatgatatttatgatgcatatggtacacttgaagaacttgagctcctaactcatgcaattgaaaggtgggatataaattgtgtggatacactgaatcaagaatatatgcaaacattttataaggatgttttgaattgttatgaagagtttgagcaagtgctagaaaaagaagaacaatacaaagttcattatgcaaaagcagcgtttaagggattagtccgatctcatttggatgaagctcgatgtttgcatagaggactcatcccaagttttgaagagtacttgaaatttgctttggataattgtggttactacatgttgatactaagctctttggttggaatgaaaactaatattgtaacaaaagatgtttttgagtggctctccaaagatcgaaagattattagagcatctgttactatttgtaggctcatggatgacatagctgaacacaagtttgaggaagatgattatgaggaacattcagcagtggaatgctatatgattgaacatggcgtttgtgaagaggaagcctatgatgaactgaataagctaataatgaatgcatggaaagaaataaatgaagagtttttgaagcctactaaagtagcttcacccatattacttcgtgctcttaacttttcaagggttatggatcttattttcaaatttggagatggttatacacacgttggaaaagtcaccaaagatattgttgctgctttgcttattcatccaatt

SEQ ID NO: 1340 - DNA, 1713 bp, synthetic construct
  misc_feature 1..1713: note = Description of Artificial Sequence: Synthetic polynucleotide
  source 1..1713: mol_type = other DNA
tcaagtacttgctaccccatcaaatgttctgtggtccataaccctagttctactactattgttagaagatcaggaaactatgaacctcccatttggtcttttgattatattcattctctttcaagcaaatataagggagaagcttatacaaatcgactgaaaaagcttgagaaagatgtgaaaatgatgctacttggcatggaaattaattctttagcccaacttgagttcattgatacattacaaaggcttggaatatcttatcattttaaaaatgaaataaatactattttaaagaaaaaatacactaataatacaaatattatgaataaaaaccctaactatgacttatatgccacttctttggaatttaggcttctacgggagtatggatttgtagtacctcaagaaattttcaatgattttaaggatgatgaaacaggagagttcaaggcaactataaatgatgatattatgggagcattggctttatatgaagcttcattttatgggaaaaatggtgaaagtgttttggaagaagcaagaattttcacaaccaaatgtcttgaaaaatacaaaatattgtcaagtgataataataataataataataatatattattattagtggatcatgctttggaaatgccacttcattggagaatcacaaaatcagaagctagatggttcattgaagaaatatatgagaaaaaacaagacatgatgatgaattctactttgcttgagtttgccaaattggatttcaacattgtgcaatcaacatatcaagaagagctcaaatatctctctaggtggtggaagcattctaaacttggagagaaattgcctttcgttagagatagattgatggagtgtttcatgtggcaagttggaataagatttgagccagaattcagttactttagaataattgctacacaaatctatgttctaatcacaataattgatgatatgcatgacatatatgcaactttggaggaactacaactcttcgctaatgctcttcaaaggtgggatttgaaagtaatagatgagttaccggattacatgaagatggctttcttcattttatacaatttcacaaatgaaatggtgtttaatgtattaggagaacatggttttgttaaccttgaatacttcaagaaattgtggatagacatatgtaaacatcaattgcaagaggcaaaatggttctatagtggataccaaccaacattgcaagaatatactgaaaatgcttggatttcagtaggaggaccagcttttcttatgcatgcttatttctgttttacaaatctcataacaaatgaagaagtggaatgtcttaaagagggttatcccaatattgttcgacatggatccctaatattacgacttgcagatgatctaggaacatgttcggatgaaatgaaaagaggcgatgttcctacatcaattcaatgttacatgcatgatactggtgtttctgaagacgaagctcgtgagcacatcaagcatttgataagcgaatcatggaaggagatgaataatgaaaatggagatcataattcttctttctcgaaagaatttgttcatgtttgcaaaaatcttggtagagcgtcacaatttatataccaatatggagatggacatgcttctcaaaatactctatcaaaagatcgtatttttaaaattattattaatcctttcccc

SEQ ID NO: 1341 - DNA, 1572 bp, synthetic construct
  misc_feature 1..1572: note = Description of Artificial Sequence: Synthetic polynucleotide
  source 1..1572: mol_type = other DNA
caacaacaaaaggttgaggaattaaaagaggtgattagaagagaaatatttggggaatcatcaatatcatcatcagcttattatgatgcttggaaaaatcaattgaagataattgatgtggtagaacgtttgggattgtcttatcattttgaaactgaaatagaaaatatgatagaacaaatctacaacaaaaccaataattttgatcttcttaaggatgaagagttgcatgatgtttccttgtgggttagacttctacgacaacatggatttagggtttcttctgatatatttaaaaaattcaaagatgaggatggaaactttaaaaaatgtttggtaagtgatactcttggtttgcttagcttatatgaagcctcacatttgagttgtgttggagaaaatatacttgatgaagcacttgctttcacaacaacacacctaaatgagtttttggcgaagaaaaaagaacaccatgatgacgatgatccattatcgaaagaaatatatcgtgccctagagaggcccttaagaaagaccctagtgaatcttcatactaagcatttcatttcgatatatgaaaaagatgcctcacataacaaagtattgctacaacttgcaaagttagattttaatctattacaatccctacacaaaaaggagcttagtgaaatcagcaggtggtggaaagaatcaaactttgtacaaaaattcccttttgcaagagatagaattgtggagctctatctgtggatgttaggagtctattatgaaccccaatactctttggcaagaaatattttagccaaaatcatagctttttcctcaattgctgatgatatttatgatgcatatggtacatttgaagagcttgaactcctaactcaagcaattgaaaggtgggatataaattgtattgatacactcaatcaagaatatttgaaaacattttataaggatcttttgaattgttatgaagagtttgagcaagtgcttacaaaagaagaaacttatagagttcattatgcaaaagaagtgtttaaagagttaatccgatcatattttgatgaagctcgatggttgaatagtggacgtgtcccaaattttgaagagtacatggaatttgcaaccattaattgtggttactatatgttgatagtgagttctttggttggaataaaaactagtattgtaaccaaagatgtttttgagtggctctccaaagatcgaaagattattagagcatctgttattatttgtaggctcatggatgacatagctgaacacaagtttgagaaagacaaatatgatgaagattctgccattgaatcgtatatgatgcaacatggtgtttgtgaagaagaagcctatgatgaactcaataagcttataattaattcatggaaagaaataaatgaagagtttttgaagccaactaaattagcttcacccatattacttagggttcttaatttttctagggttatggatcttctctacaaaaatggtgatggttttacacatgttggaaaagtcaccaaagatactgttgctgctttgctaattgatcccatt

SEQ ID NO: 1342 - DNA, 1584 bp, synthetic construct
  misc_feature 1..1584: note = Description of Artificial Sequence: Synthetic polynucleotide
  source 1..1584: mol_type = other DNA
aataacaaagagagttatgtgaagattattgagctgaaggaacaagtgaagaataaattacttcatggtcttcatcctttggaaaaccctttagagacacttgaatatattgatgatattcaacgattggggttatcttattatttcgaaaatgaaattgaacaagttttgaagcaatttcataataataacaatcttcatcacgattttggtgataacctttatgctgatgctcttcgctttcggttgcttagggaacaaggttataatagtgcatgtgaggtattcgccaaatataagaatgagagaggaaaatttaaggaatcaattttgagtgacattcgaggaatgttgaacttgtatgaagcttcacaaatgagagtttgcagagaaaaaatactagatgaagcacttatcttcacaactactcatcttcagtccttagtggaaacatcccaattgagctctccttatttagacctagtgaaacatgccctaatgcaccctattcgaaagagcttacaaagaagagaggcaagactttacatatcacgttaccaccaactaccttctcacgaaaagcttcttttaactcttgccaaactagatttcaacttgcttcaacaactacatcaaaaagaattaaattatattacgaggtggtggaaggagtttgacttcaaaagtaagcaatctttttcaagagacagaatagtggagtgttacatttggaattatggagtatattttgaagctcaaacttcccaaattaggttgatgatgaccaagttgatttctttgcttactattattgatgattcttatgatagctatggtacacttgaagagctaaggccttttactgaagcagttagaaaggtatttaattatatatacaaacatatgaagtgggatatatctgctactgaaaatttactagagtacatgaaagtatgttacaagaaatttttagaatttttcaatgaaattgaagaatttacaaaggaaaatccatactgtgcgagctatgttaagaaagggttgcaatgtatggttagagcttatagtaaggaagcccaatggttacacaataaatatatgccaacatttgatgaatattatccaattggacttgataatgctggatctgatgagctaatatcaatggccttttgtggaatgggaaatgttgtaacaaaagaatctatggattggatattttctcaaccccaacctaagattatacgaactatgtcaattgttggaagacttatgaatgacattggctaccacaagtcggatcgaagaaaattatcaaaagatgtagtggcttccgctgtggagtgttacatcaaacaatatggtgtaacagatgaagaagctatagagaaacttaacgaacaagttaatgattcatggaaggatctcaatgaagatcttctttatccaatcgctattcctagaccactcttaatgagagttctcaatcttgtacgagtgaaccatgagatgtatagagaaggcgacggttttacacaaccaacattgctcaagaatttgattgatactctcatcatcaatccc

SEQ ID NO: 1343 - DNA, 1689 bp, synthetic construct
  misc_feature 1..1689: note = Description of Artificial Sequence: Synthetic polynucleotide
  source 1..1689: mol_type = other DNA
agtactacaatattcaaagaacaaccggaagcaattgtccgacgatcaggaaactacaaacccacgttgtgggatgctcattttttcaaatcactccaagtcatatatacggaggaaagctatgggaaaagaatcaatgagctgaaagaagatgtgagaagaattcttgagaaggaggctgagaatcctttagttaaacttgaacagatcaatgatttgagcagacttggaatatcttatcactttgaagatcaaattaagacaatattaaacctgacatttaacaataataatgcattgtggaagaaagataatctgtatgccactgctcttcatttcaaactccttagacaatatggattcaatcctgtatcttcagaggttttcaatgccttcaaagaccagaaaaaagagttcaaagaaagtttgagtaaggatgtgaaaggaatggtatgtctatatgaggcttcattctattcatttaggggtgaacccatattagatggagcaagagacttcacaaccaaacatctgaaacaatacttgatgacgaggcaatgtcaaactaaatctgttgaccatgatgatgatgatgatcttgtgaaacttgtggagcatgccttggatcttccactccattggagattgccaagattggaggctaggtggttcattgatatgtatgctgaaaggaattatgatatgaatccaacttttcttgacttcgctaaacttgactataacttcgttcagtcagcataccaaaaagagctcaaatatatttcaaggtggtggagtggttctaggttgacagaaaggctaccatttgctagagacagagtagtggaaattttctattctgcagtggcattaaaatatgaggcagaatttggatttgttagaactgtgatgacaaaaattggtctcttgctaacactcatggacgatatatatgatgtgtatggtacactagatgagcttcagctttttctaggggcaattgagaggtggaatataaatgaattggatcagctacccgattacatgaagatattgtttgttgctttttataacaatgtgaatgagatatcttattatgtccttaaagaaaatgggattcacatcatcaaatatctgaagaaagcgttgggggatctgtgtaaatgctatatggaggaggcaaaatggtttcacagtggacacataccaagtttagaagaattcattgagaatggatggaaatcaattacaatacctctttgtcttatctatcattattgcttaattacaacttcaattacagaacaagacatggaacacttgcttcaatatccaactattttacgtgtctcaggaactgtctttcgatttatagatgatttgggaacctcatcagatgaacttgaaagaggagataatccttcatcaattcaatgctacatgcgtgaaaagggtgttagtgaaaatgaaagccgtgaacacatatggaatttaataagtgaaggatggaaggaaattaatgaagtcaaagcttcaaactctccatactctcaagtgtttattgaatctgccattgattttgttagaggagcaatggagatgtatcacaagggtgatggctttggtactaatcaagaccgatatcttaagaccaaagttgtcaacatgttcttcgatccaattccaatt

SEQ ID NO: 1344 - DNA, 1683 bp, synthetic construct
  misc_feature 1..1683: note = Description of Artificial Sequence: Synthetic polynucleotide
  source 1..1683: mol_type = other DNA
caatgtagtttggccaaaagccctagtagtgatactagtacaattgttagaagatcagccaactatgatcctcccatttggtcttttgatttcattcagtctcttccatgcaaatataagggagaaccctatacaagtcgatcgaataagctaaaagaagaagtgaaaaagatgttagttggaatggaaaactctttagtccaacttgagttgattgatacattacaaagacttggaatatcttatcattttgagaatgaaatcatttctattttgaaggaatatttcactaatattagtactaataaaaaccctaaatatgatttatatgccactgctttcgaatttaggcttttacgcgaatatggatatgcagtgcctcaagaaatttttaatgattttaaggacgagacgggaaagttcaaagcgagtattaaaaatgatgatattaagggagtattggctttatatgaagcttcattctatgtgaaaaatggcgaaaatattttggaggaagctagggttttcacaacagaatatctcaaaagatatgtaatgatgattgatcaaaacataatattaaatgataatatggcaatattagtgagacatgccttggagatgccacttcattggaggactataagagcagaagctaagtggttcattgaagaatatgagaaaacacaagacaagaatggcactttgcttgaatttgcgaaattggatttcaacatgcttcaatcaatatttcaagaagatctaaaacatgtctcgaggtggtgggaacattctaagcttggaaagaataaaatggtttatgctagagatagattggtagaggcttttctatggcaggttggaataagatttgagccacaattcagccactttaggagaatatctgcaagaatatatgctctaattacaatcatagatgacatatatgatgtgtatggaacattggaagagttagagcttttcaccaaggctgttgagagatgggatgcgaagaccatacacgagttaccagattatatgaagttgcctttctttactttatttaacaccgtaaatgaaatggcgtatgatgtattagaagagcataattttgtcaccgttgaatacctcaagaactcgtgggcagagttatgtaggtgctatttggaagaggcaaaatggttttatagcggatacaaaccaaccttgaagaaatatattgagaacgcctcgctttcaataggaggacaagttatttttgtgtatgcttttttctctcttacaaagtccataacaaatgaggccttagagtccttgcaagagggtcattacgctgcatgtcgccaaggatccttgatgttacgacttgcagatgatcttggaacatcatcagatgaattgaaaagaggtgacattcctaaatcggttcaatgttacatgcacgagactggtgtttctgaagatgaagctcgtgaacacatcaaatttttgataagtgaaatatggaaggagatgaatgatgaagatgaatataactctattttctctaaagagtttgttcaagcttgcaaaaatcttggtaggatgtcattatttatgtatcaacatggagatggacatgcttctcaagatagccattcaaggaaacgtatttcagatttaattattaaccctattccttta

SEQ ID NO: 1345 - DNA, 1680 bp, synthetic construct
  misc_feature 1..1680: note = Description of Artificial Sequence: Synthetic polynucleotide
  source 1..1680: mol_type = other DNA
gatagttctgttactaatattgttcgaagatcagccaactttgaaccatccatttggtcttttgatttcattcagtctctttcaagcaaatataagggagaaccttatacaagtcgagtaaaaaaactcgaggaagatgtgaaaaggatgctagttgagatggaaaactctttagctcaacttgaactcattgacacgttacaaagacttggagtatcttatcgttttgagaatgaaataaatactattttaaaagaaaaatatgtcaatattaatggtaatattaataaccctaattataatttatatgccactgctcttgaatttaggcttctacgtcaacatggttatgctgtacctcaagagacttttaattattttaaggacgagacaggaaaattcaaaacaaacataagtggtgatatcatgggagtattggccttatatgaagcttcattctatgagaaaaaaggcgaaagcattttagaggaagctagaattttcacaactgaatgtctcaaaaactacacaataatgatatcagagcaaaagaaattgatgattaataataattatgattattattacgatattgaagtagtgaatcatgctttggagctcccacttcatcgaaggaccacaagaatagaagctaagtggttcatcgatacgtataagaaaaaacaagacatgaatcctattttgcttgagtttgccaaactcgatttcaacatgatacaatcaacacatcatgaagatttgaaacatatattcaggtggtggaggcatactaaacttggtgagaaattgaattttgcaagagatcgattgatggaatgttttttatggaaagttggaataagatttgagccaaaattcagttattttagaacaacaactgtcaaattacttgagctaataacattaattgatgatatatatgatgtttatggaacattagatgaattagagcttttcaccaaagctattgagagatgggatgtggaaatgataaatgaattaccagaatacatgaagatgccttatattgttttacacaatacaataaatgaaatggtatttgagatattaagagatcaacacatcaccatcaaaattcaatacttaaagaaaacgtgggtagatctgtgtagatgttttctacaagaagcaaaatggtattacagtggatacacaccaacattggaagaatatattgaaaatggttggatttcagtgggagcaccagttcttattgtgcatgcttattttcattcaaataataataaagagattttcgaatgcttggaacatggttattatcctaccataattcgtcacagtgccataataatacgacttacaaatgacctagcaacatcatctgaagaactgaaaagaggtgatgctccgacgtcaattcaatgttacatgcaagaaaaaaatatatgtgaagaggaagctcgtgaacatattaagtttttaataagtgaagcgtggaaggagatgaataacagtgaatctgatgatggattaatatatccaatctcattgattgaagatgcgagaaactttgctaggataggattatacatgtatcaacatggtgatggtcacagttctcaggataatctatccaaagaaagaatttcatcctttattattaaacctattccccta

SEQ ID NO: 1346 - DNA, 1590 bp, synthetic construct
  misc_feature 1..1590: note = Description of Artificial Sequence: Synthetic polynucleotide
  source 1..1590: mol_type = other DNA
aataacaaagagagttatgtgaagattattgagctgaaggaacaagtgaagaagaaattacttcatggtcttcaacctttggaaaatcctttagagacacttgaatatattgatgatattcaacgattggggttatcttattattttgaaaatgaaattgaacaagttttgaagcaatttcataataataataacaatcttcatcatgattttggtgataataacctttatgctgatgctcttcgctttcggttgcttagggaacaaggctattttatagcatgtgaggtatttgccaaatataagaatgagaaaggaaaatttaaggaatcaatttcgagtgacattcgaggaatgttgaacttgtatgaagcttcacaaatgagagttcgcagagaagaaatactagatgaagctcttatcttcacaactactcatcttcagtccttagtggaaacatctcaattgagctctccatatctagacctagtgaaacatgccctaatgcaccctatccgaaagagctttcaaagaagagaggcaagactttacatatcactttaccgtaaactaccttctcacgaagagcttcttttaaccctcgccaaactagatttcaacttgcttcaacaactacatcaaaaggaattgaattatattacgaggtggtggaaggagtttgacttcaaaagtaagcaatctttttcaagagacagaatagtggagtgttacatttggaattatggagtatattttgaagctcaaacttcccaaattaggttgatgatgaccaagttgatttctttgcttactattattgatgattcttatgatagctatggtacacttgaagagctaaggccttttactgaagcatatatatatttacttaattaatatgatatgatcatcaggtgggatatttttgctactgacaacttgccagagtacatgaaagtatgttacaagaaatgtttagaatttttcaatgaaattgaagaatttacaaaggaaaattcattctgcgcgagttatgttaagaaagggttgcaatgtatggttagagcttatagtaaggaagtccaatggttacacaataaatatatgccaacatttgatgaatattatccaattggacttgataatgctggatctgaagagctaatatcaatggccttttgtggaatgggagatgttgtaacaaaagaatctatggattggatattttctcagccccaacctaacattatacgaactatgtcaattgttggaagacttatgaatgacattggctaccacaagtcggatcgaagaaaattatcaaaagatgtagtggcttctgctgtggagtgttacatcaaacaatatggtgtaacatatgaagaagctatagagaaacttaacgaacaagttaatgattcatggaaggatctcaatgaagatcttctctatccaatcgctattcctagaccactcttaatgagagttctcaatcttgtacgagtgaaccatgagatgtacagagaaggtgacggttttacacaaccaacattgctcaagaatttgattgatactctcatcatcaatccc

SEQ ID NO: 1347 - DNA, 1896 bp, synthetic construct
  misc_feature 1..1896: note = Description of Artificial Sequence: Synthetic polynucleotide
  source 1..1896: mol_type = other DNA
atggctgcattagtgtccactgtaagtagtattattaggtggaatagtaataataataataccttcactagatctgtgaaatcatgtttaagttcaaattaccataataataataatattattcataataaaactgcattaatgtccaccaataataataataataataataataataataatcagaagagatcagcaaactatcaacccccactttggcattttgactatgttcaatcactttctactcctttcaaggaaggagcatatgccaaaagagttgagaaagtaaaagaagaggtaagagtaatggtgaagagagcaaaagaggaggagaagcctttatctcaacttgagctaattgatgtaatgcaaagacttggaatctcttaccactttgagaatgaaattaatgacatattgaaagatatatataacaacaataatgtgtgcaacaccaacaaaaatgtgtatgccaattctcttgaatttagactcctaagacaacatggttatccagtgtctcaagaaatttttagtacgtgcaaagatgaaagaggcaattttatggtgtcttccaatgatatcaaaggaatgttatctttatatgaagcttcattctatttggtagaaaatgaagatggtattttggaagagacaagacacaaaacaaagaaatatcttgaggaatacataatcatgatcatggaaaaacaacaatcattattagatcaaaataataataataatgataatgattatgattatgaactagtgagccatgcattggagcttccacttcattggagaatgttaagattggagagtaggtggtttattgatgtgtatgagaagagactagacatgaaccctactctacttaccttagctaaactagatttcaacattgtccaatcaacataccaagatgatcttaaatatgttttcaggtggtggaaaaacactggtttgggagaaaagttgaaatttgcaagagatagaatgatggtgaattttttatggacaataggagtttcatttgagccacactacaaaagtttaagaagaatggctacaaaagtaaatgctttaataacaataatagatgacatatatgatgtttatggtacacttgatgaattggagctcttcactaatgtggttgagagatgggatgttagtgctatgaatgggctccctgagtatatgaagtcatgtttccttgctttgcacaattttataaatgactttgcatttgatgtgttaaaaggaaaaagcctccatgtaaaaaaataccttcaaaaaacgtgggcagatctttgtaaatcttatttaagagaagcaagatggtattatgatggatacacaccaagatttgaagagtacattgagaatgcatggatatcaatatcaggacctgttatactatcacatttatacttttttgtagtaaatccaaacgaggaagatgccttattaagtacttgctttaatggataccctaccataatacgccattcgtcgatgattttacgacttacaaatgatctcgccacttcaacggatgagttgaaaagaggtgatgttcccaaatcaattcaatgcaaaatgcatgaagatcgtgtatgtgaagagaaagctcgtcaacatattaagttattaataaatgaaacatggaagtttcttaataaagattgcataaatttggatgatgattactctccaatgttctctaaatctaataataatattaataaggctttcattgaaatgtgtttaaaccttggtagaatgtcacattgcatttatcaatatggagatggacatggaattcaagatcgccaaacaaaagatcatgtactatcattacttattcaccctattcttcttacccaa

SEQ ID NO: 1348 - DNA, 1491 bp, synthetic construct
  misc_feature 1..1491: note = Description of Artificial Sequence: Synthetic polynucleotide
  source 1..1491: mol_type = other DNA
gaacgctccatagaagctttgaacttggtcaacgctgtgcttagagtcggcattgattatcatgtccaagatgagattaaatctatccttgaaagggaacatataattttcagtgaccatattagtaaccaatattttaataatattaatcaagaccacctgtatgaggtttctcttcgtttccgattactgagacaaggaggttatgatgtctctccagatgtgtttaacgagttgatgaaggacaaaaagggaaatttcaatgttttagtggaagaagacagagagggactaagagaattgtttgaagcctcacaagtaagaatagaaggagaagaggtactagaggaagctgaagtgttcagtggcgaacacctaaaagaatgggcaaatcttcatcgtcatacgagtgaagctcgaagtattcaattaacgttagaccaaccttgtcataaaagcttggccagggtcacatctccaaactttttggacagtttctcagccaacactgctaccagagaccaaggctggacctggatgacccttttaaacaaactggtcacaatggacttcaaaatagttcagtctattcaccaaagggaaattgttcaagtctccaaatggtggaaagagcttggtttggcagaggagttgaaatttgctagagaccaacccctaaaatggtacctctggacagtggcaagtctaccagatccaagcttgtctgaagagaggattgaactaactaaacccatttctctcgtctacataatagatgatatttttgatgtttatgggacactagacgaactcactcttttcacagacgcagttaataattgggaaattaaagagcagttacccgactatttgaagatatgtttcaaggcacttgatgatataaccaacaaaattagctacgtggtgtacagaaaacatggatggaacccaattgactccttaagaaaatcgtggggaaaactgtgcaatgcgttcttgttagaagcagagtggtttggttgtgggaagttgccaaatgaagaggagtatttgaagaacgcgattgtgagttctggtgtacacgtggtgctagttcatatgttctttctcttaggtgaaggtatatccatggaagctgtaaacttactggacaacattccaggccttgtgtcttctacagcagcaattcttcgtctttgggatgacttaggaagtgccaaggatgagaatcaaaatgggcatgatgggtcttacgttgagtgctacatgaaaagacacaaggagtgttcaatgggcgaagcaagggagcaagtgattcgtatgattaaaaatgagtgggaacgcctcaataaggagtgtttctcgccaaaacattttcccatgtgcttcagaaagggttgtcttaatgctgctaggatggttccagtgatgtatgactatgatgatcatcatcgccttccaagcctccagaattatatcaactcacttctc

SEQ ID NO: 1349 - DNA, 1677 bp, synthetic construct
  misc_feature 1..1677: note = Description of Artificial Sequence: Synthetic polynucleotide
  source 1..1677: mol_type = other DNA
gatagttctgttactaatattgttcgaagatcagccaactttgaaccatccatttggtcttttgatttcgttcagtctctttcaagcaaatataagggagaaccttatacaagtcgagtaaaaaaactcgacgaagatgtgaaaaggatgctagttgagatggaaaactctttagctcaacttgaactcattgacacgttacaaagacttggagtatcttatcgttttgagaatgaaataaatactattttaaaagaaaaatatgtcaatattaatggtaatattaataaccctaattataatttatatgccactgctcttgaatttaggcttctacgtcaacatggttatgctgtacctcaagagacttttaattattttaaggacgagacaggaaaattcaaaacaaacataagtggtgatatcattggagtattggccttatatgaagcttcattctatgaaaaaaaaggcgaaaacattttagaggaagctagaattttcacaactgaacgtctcaaaaactacataatgatatcagagcaaaagaaattgatgattaataataattatgattattattacgatattgaagtagtgaatcatgctttggagctcccacttcatcgaaggaccacaagaatagaagctaagtggttcatcgatatgtacaagaaaaaacaagacatgaatcctattttgcttgagtttgccaaactcgatttcaacatgatacaatcaacacatcatgaagatttgaaacatatattcaggtggtggaggcatactaaacttggtgagaaattgaattttgcaagagatcgattgatggaatgttttttatggaaagttggaataagatttgagccaaaattcagttattttagaacaactgtcaaattacttgagctaataacattaattgatgatatatatgatgtttatggaacattagatgaattagagcttttcaccaaagctattgagagatgggatgtggaaatgataaatgaattaccagaatacatgaaaatgccttatattgttttacacaatacaataaatgaaatggtatttgagatattaagagatcaacaaatcaccatcaaaattcaatacttaaagaaaacgtgggtagatatgtgtagatgttttctacaagaagcaaaatggtactacagtggatacacaccaacattggaagaatatattgaaaatggttggatttcagtgggagcaccagttcttattgtgcatgcttatttttctcattcaaataataataaagagattttcgaatgcttggaacatggttattatcctaccataattcgtcacagtgccataataatacgacttacaaatgacctagcaacatcatctgaggaactgaaaagaggtgatgctccgacgtcaattcaatgttacatgcaagaaaaaaatatatgtgaagaggaagctcgtgaacatattaagtttttaataagtgaagcgtggaaggagatgaataacagtgaatctgatgatggattaatatatccaatctcattgattgaagatgcgagaaactttgctaggataggattattcatgtatcaacatggtgatggtcacagttctcaggataatctatccaaagaaagaatttcatcctttattattaaacctattccccta

SEQ ID NO: 1350 - DNA, 1656 bp, synthetic construct
  misc_feature 1..1656: note = Description of Artificial Sequence: Synthetic polynucleotide
  source 1..1656: mol_type = other DNA
atgtcaaatattcaagtcttagcttcatctcaattaagtgacaaaattattgctcgtccaacaacaaattttcacccttctatttggggcgatcgattcctccattacaatatttcagaacaagatttggtttgcaaagaagaaagaattgaagaattaatacaagttgtaaagaaagagatattatcttcaaatcatgatcaattgaagttgattgacaatctccaacgtttgggattatcacatcattttgagagtgaaattgagaaattgttggaacaattaaatatcggcactcatcatcaaaatcatcaagatctacatgatgcttctctttggtttagattattaagacaacatggatttaatgtttcatcaagtatatttgaaaaatttaaagacgagaaaggtaactttaaagaaagcctaataactgatgttccaggtttgcttagcttgtatgaggcttcccacttgagttatgttggagaaagcatactagatgaagcacttgctttcacaactactcaccttaaggctattgtggcaaatagtaaagatcatccattatcacatcaaatatccatagccttgcataggcctctaagaaagaccatagagaggcttcatgctaggttttacatctcaatctatgaaaaggatgcctctcataacaaagtattgctagagcttgcaaagttagatttcaatctacttcaatgtttccacaaaaaggaacttagtgaaattatgaggtggtggaaagagcatgagtttgcaaagaaatttccttttgcaagagataggatggtggaacagtatttttggatattgggtgtatattatgaacccaaatactctcgagcaagaaaacttctaaccaaagtcattgcattagcctcaatcactgatgatatttatgatgcatatggtactattgatgagcttgagcttcttacaaaagcaatgcaaaggtgggacataacttgtatggataaacttgagccagaatatttaaagacatattataaggcaatgttggattcttatgaagaatttgaaaaggagcttaaaaaggaagaattatacaaacttgagtatgcaaaagaagagatgaaaagaattattggagcttattttgaagaagctcgatggttgagtgaaggatatttgccaaggttggatgagcatttgagagtttcatatgtttcttgtggttacgttttgttgatagccacaagttatgtaggaatgcatgatattgtaacacatgaaactctaaattggctctccaaagaccctaaaattgtttcagcttccactctccttgctaggttcatggatgatattggttctcgcaagtttgagcaaaagagaaatcacataccatctacagtggattgttacatgaaacaatatggggtatcagaggaagaggcaattaaagaacttaataaaagagtggacacccactggaaagaaattaatgaagactttattaggccaactgttgtgccttttcctatcttagttcgtgttcttaattttacaaaaacagtagatcttctttacaaagagggcgatgatcaatacacaaatgttggaaaagtgctcaaagaaagcattgctgctttgcttatagattcaatcccatta

SEQ ID NO: 1351 - DNA, 1896 bp, synthetic construct
  misc_feature 1..1896: note = Description of Artificial Sequence: Synthetic polynucleotide
  source 1..1896: mol_type = other DNA
atggcttttcaccaatttgctccatcatcatccctccctatttggagtagaattaataatcgttttacaccaaaaacttctattattacttctatttcaaaaccaaaatcaaacttgaaatcgagatcgagatcaagtacttgctaccccatacaatgtactgtggtcgataaccctagttctacgattactaataatagtgatcgaagatcagccaactatggacctcccatttggtcttttgattttattcaatctcttccaatccaatataagggagaatcctatacaaggcaattaaataagttgaagaaagaagtgacaagaatggtccttggactggaaattaactctttagccctacttgagctaattgatacattgcaaaggcttggaatatcttaccattttaagaatgaaataaacactattttgaagaaaaaatacactgataattatattaacaataatattattattactaaccctaattataataatttatatgccattgctctcgaatttaggcttctacgccaacatggctatacagtacctcaagaaatttttaatgctttcaaggataagagagggaaatttaaaacatgcttgagtgatgatattatgggagtattgtgtttatatgaagcttcattctatgctatgaaacatgaaaatattttggaggaagcaagaattttttcaactaaatgtcttaaaaaatacatggagaaaatggagaatgaggaagagaaaaaaatattattattagatgataataatattaatagtaatttgctattaattaatcacgctttcgagcttccgcttcattggagaataacaagatcggaagctaggtggttcattgacgaaatatatgagaaaaaacaagacatgaattcgactttgttcgagtttgcgaaattagattttaatatagtgcaatcaacacaccaagaagatttacaacatttatcgaggtggtggagggattgtaaacttggtgggaaattgaattttgctagagatagattgatggaagctttcttatgggatgttggactaaaattcgagggagaattcagctattttagaagaataaatgcaagattatttgtgcttataacaataattgatgatatttatgatgtatatggaactttggaggaattagagcttttcactagtgctgttgaaagatgggatgtgaaattaatcaatgagttaccagattacatgaagatgcctttctttgttttacacaataccataaatgagatggggttcgatgtattagtacaacaaaactttgtcaacattgaataccttaagaaatcgtgggtagatttatgtaaatgttatttacaagaagcaaaatggtattatagtggataccaaccaacattggaagaatacactgagttgggttggctttcaataggagcatcagtaattcttatgcatgcttatttttgtttcacaaatcctataacaaaacaagacttgaaaagtttgcaattgcaacatcattatcccaacataattaaacaagcatgcttgattacaaggcttgcagatgatttaggaacatcttcggatgaattgaatagaggcgacgttcctaaatcgattcaatgttacatgtacgataataatgctaccgaagacgaagctcgtgaacacatcaagttcttgataagtgaaacatggaaggatatgaataagaaagatgaagatgagagttgtttatcagaaaattttgttgaagtttgcaaaaatatggctagaacagcactattcatatatgagaatggagatggacatggttctcagaatagtttatcaaaagaacgtatttcaaccttgattattactccaattaatattcctaaa

SEQ ID NO: 1352 - DNA, 1737 bp, synthetic construct
  misc_feature 1..1737: note = Description of Artificial Sequence: Synthetic polynucleotide
  source 1..1737: mol_type = other DNA
tcaaaatcaaaatcaagtacttgctaccccatccaatgtactgtggtcaataatagtagccctagctctactactaaattttctattgttcgaagatcggcaaattatgaacctccgatttggtctttcgattacattcaatctctttcaacccaatataagggagaatcctatacaaggcaattaaataagttaaagaaagaagtgaaaaggatgctccttcgaatggaagttaactctttagccctactcgagttaatcgatacattgcaaaggcttggaatatcttatcattttaagaatgaaataaacactattttgaagaaaaaatacacaaatacttatattaacaataatattactaaccataattataatttataccccattgctctcgaatttaggcttctacgccaacatggctatgcagttcctcaagaaatttttaatattttcaaagacgtgagtggaaaatttaaagcaatcataaatgacgatgatattatgggaatattggcgttatatgaagcttcattctatgagaaaaatggtgaaagcatattggaggaagctagggttttcacaaccaagtgtctcgaaaattacatgatgataacggaggaaaacaaattagatgatgatgatgatcgtaataatattattgtagtaattagacatgcgttagagcttccacttcattggaggactgcaagaacggaggccaagtggtttatcgatgtatacgagaaaagacaagatatgaattctactttgcttgagtttgcaaaactagatttcaacatggtacaatcaatgcatcaagacgatctaaaacatttgtctaggtggtggagtcatactaaactcggagaaaaactgaattttgtgagagataggttgatggggtgttttttatggaatgttggattaagatttgagccagatttcagctactttaggagaatatctgcaagaatatatgttcttattacaataatcgatgatatatatgatgtttacggaacattagaagaattagagcttttcactcgtgttgttgagagatgggatgtaaaactactaaaagacttaccagattatatgaagatgccttttcttgttttacacaataccattaatgaaatggcattagatgtattaaaagaaaaacactttgtcaacattgaatgcctcaagaaaacgtgggttgatatgtgtagatcttttctacaagaggcaaaatggtactataatggatacacaccaacatttcaagaatacattgaaaatggttggatttcagtaggagcaccagttattcttgtgcatgcttatttctcttttgcaaatcccataactaaagaggttttggaaatcttccaacaaggttatcccacaataattcgtcaatctgccatgatcgtacgtttggcaaatgatctagcaacatcatctgaggaattcgaaagaggtgactcgcctaaatcaattcaatgttacatgcaagaccataatgtatctaaagaggaagctcatgaatacattaagttttcaataagagaaacatggaaggagatgaatagtacttttaatattgaagatggaaattcatcattggttgatgatgccaaaaactttgcaagaatgggattatttatgtatcaacatggagatggacatagttctcaagataatttagcaaaagagcgtatttcgaaattcattatcaatcctata

SEQ ID NO: 1353 - DNA, 1452 bp, synthetic construct
  misc_feature 1..1452: note = Description of Artificial Sequence: Synthetic polynucleotide
  source 1..1452: mol_type = other DNA
cttgaatatattgatgatattcaacgattggggttgtcttattattttgaaaatgaaattgaacaaattttggagcaatttcataataattatcaaaatctaattgattttggtgataataacctttatgctgatgctctttgctttcggttgcttaggcaacaaggttataatattgcatgtgacatattcgacaagtacaagaatgaaaaaggaaaatttaaagaatcaatttcgagtgacattcgaggaatgttgaacttgtatgaagctgcacaaatgagagttcatggagagaaaatactagacgaagcacttatctttacaactactcatcttgaatcctcagttaaaacatgtcaattgagctctccttatctagacctagtgaaacatgccctaatgcaccctattcgaaagagcttacaaagaagagaggcaagactttacatatcactttatcatcaactactttctcatgaggagattcttttaacacttgctaaattagatttcaacttgcttcaaaaactacatcaaaaggaactaagttatattacgaggtggtggaaggagtttgattacaaaagtaagcattcatttataaaagacagaatagtggagtgctatttctgggtttatggagtgttttttgaggcagaaacttcccaaatcagactaataatcaccaaattaattgctattctcacaataattgatgatgcttatgatagctttggttcacttgaagaactagagccttttactcaagcaattgaaaggtgggatatatgtgccatagatactctgcctgagtacatgaaaatattttacatgaaacttttggagatctacaatgaaattgaacaattttctaaggaaagatcatactgccctagctatgctaagaaaggggtgcaatctctaattagagcttattttaaggaagccaaatggttacacacaaaatatataccaacattagatgaatatatgccagttggggttgatagtgcaggatcttttatgctcatttcaatggtttttattggaatgggagatattgttacaaaacattctatggattggatattttctaatcctcaacctaaaattatacaaactatggcaatagttggaagagttatgaatgacattggctaccataagaagaaatcatcaggagaaattgtggcttcaactgtggagtgttacatgaaacaatatggcgtgactggtgaagaagctatagagaaacttagcgaacaagttaaagattcatggaaagatctcaatgaagatcttctcaatccaatcactatctctaggccactcttaatgcaagttctaaagcttgtacgagtgaaccatgagatttatagagaaggagatggctttacacaacccactttgctcaagaatttgattcattctctcatcatcaatccaatt

SEQ ID NO: 1354 - DNA, 1593 bp, synthetic construct
  misc_feature 1..1593: note = Description of Artificial Sequence: Synthetic polynucleotide
  source 1..1593: mol_type = other DNA
atgaaggaaaataatgatgatagtgaaatagttattctgaagaaagaagtgaagaagaaaatacttgagcttgactatgttgaaaacccattagagacacttgaatttattgattcaattcaacgattgggagtgtcgtactattttgaaaatcaaattgaagtagttttgaagaacatatgtaacaaatttcacgaggaaaataatgacgacggtgatctttatgttgttgctcttcgatttcgattggttagacaacaaggttattacatgtcatgtgacgtgttcaacaagttcacgaacaatgaaggaaaattcaaagagtcactttttaacgatattcgaggaatgttaagcttatatgaggcttcacaactaagagtgcatggagagaaaatactagatgatgccctaatattcacaacaaatcacctcgaatctggagctaaaacctcgaaattaagctctcatatttcaaaccaagtaaatcacgcgttgaaaaaccctattcgaaagagcttgcaaaggagacaggctagacattacatgtctttataccatcaaatctcttctcacaatgagcatcttctagctctagctatactagatttcaacttgctacaaaaactttaccagaaggaattaagtgatctcacaaggtggtggaagaagtttgattatgaaagaaggcaatcgttctctagagaaagaataatggattgttacttttggacttttggagtgttttttgaggctcaaacctcacatattaggttgctgatgagcaagttgattgctttgctcactcttgttgatgatatttatgataactttggaacttttcaagagctacacctcttaactgaagcaatacaaagatatatatgtatatatatatatatgagtaggtgggatatgtgtttgattgatcaactaccagagtacattcaaccatgttacaaggaaatcttgaatctttacactgaaattggagaatttactaaggacaaatcatattgccttagctacgctaagaaaggattccaagagctagtaaaagggtactttgaggaagccaaatggttacaccaaaaacataatccaacactagatgagtatatgccaattgcacttgttactgctgcttctcctctactcattgctatttcatttattggaatgccaaatgttgttacaaaagattctatgaattggatcttttctcatccacagcctaaaagtgtgcggactctgtcgatcgttggtagagttcttaacgacattggcttccaccagtggagggaaaggagaacagagaaagtagatttttcagctgtggattgttatataagacaatatggtgtggaagaagaagaagcaatacaaagacttaaagaacaagttagtgattcatggaaagatctgaatgaagagtgtctctatcccaacaatatgaatatcccaatgccacttctaatgagagttcttgatcttgtacggatgaataatgaattatacagagaaggagatggttttacaagagaagctttcatcaaagatttgattgattctctcatcatcaatccctacatc

SEQ ID NO: 1355 - DNA, 1863 bp, synthetic construct
  misc_feature 1..1863: note = Description of Artificial Sequence: Synthetic polynucleotide
  source 1..1863: mol_type = other DNA
aatagtaataataataatgccttcactagatctgtgaaatcatgtttaagttcaaaccataataattataatattattcataataaaactgtattaatgtctaccaataataataataataataataatattatttctcgaagatcagcaaactatcaaccttcactttggcattttgattatgtacaatcactttctacccctttcaaggaaggagcatatgccaaaagagttgagaaagtaaaagaagaggtaagggtaatggtgaagagagcaaaagaggaagagaagcctttatctcaacttgagctaattgatgtattgcaaagacttggaatctcttatcactttgaggatgaaattaatgatatattgaaacatatatataacaacaataatgtgtacaacaccaacaataatgtgtatgccaattctcttgaatttagactcctaagacaacatggttatccggtgtctcaagaaatttttagtacgtgcaaagatgaaagaggcaattttatggtgtgtaccaatgatatcaaaggaatgttatctttatatgaagcttcattctatttggtagaaaatgaagatggtattttggaagagacaagagaaacaacaaagaaatatcttgaggaatacataatcatgatcatggaaaaacaacaatcattattagatcaaaataataataataatgataatgattatgattatgaactagtgagccatgcattggagcttccacttcattggagaatgttaagattggagagtaggtggtttattgatgtgtatgagaagagactagacatgaaccctactctacttaccttagctaaactagatttcaacattgtccaatcaatataccaagatgatcttaaacatgtcttcagctggtgggaaagcactggtatgggaaagaagttggaatttgcaagagatagaacaatggtgaatttcttatggacagtaggagttgcatttgagccacattacaaaaattttagaagaatgattacaaaagtaaatgctttaattacagtaatagatgacatatatgatgtttatggtacactagatgaattggagctcttcactaatgcagttgagagatgggatattagtgctatggatgggctccctgagtatatgaagacatgttttcttgctttatacaatttcataaatgatcttccatttgatgtgttaaaaggagaagaaggcctccatataataaaattccttcagaaatcgtgggcagatctttgcaaatcttatttaagagaagcaagatggtattatgatagatacacaccaagttttgaagagtacattgaaaatgcatggatatcaatatcaggacctgttatactatcacatttatacttttttgtagtgaatccaaacaaggaagatgccttattaagtacttgctttgatggataccctaccataatacgacattcatcgatgattttacgtcttacagatgatcttgcaacttcaacggatgaactgaaaagaggcgatgtttctaaatcagtccaatgcaaaatgcatgaagatggcgtgtttgaagaagaagctcgtcaacatattaagttattaataagtgaaacatggaagcttcttaataaagattacataaatttggatgatgatgatgatggtgatgactactctccaatgttctataagtctaataatattaataaggctttcattgaaatgtgtttaaaccttggtagaatggcacattgcatttatcaatatggagatggacatggaattcaagatcgccaaacaaaagatcatgtactatcattacttattcaccctattccacttacccaa

SEQ ID NO: 1356 - DNA, 1653 bp, synthetic construct
  misc_feature 1..1653: note = Description of Artificial Sequence: Synthetic polynucleotide
  source 1..1653: mol_type = other DNA
atgtcaaatattcaagtcttagcttcatctcaattatgtgacaaaattattgctcgcccaacaacaaaatttcacccttctatttggggtgatcgattcctccattacaatatttcagaacaagacttggtttgcaaacaagaaagagttgaagaattaatacaagttgtaaagaaagagatattatcttcaaatcatgatcaattgaagttgattgacaatctccaacgtttgggattatcatatcatttcgagagtgaaatcgagaaattattggaactattaagtatcggcactcatcatcaaaataataatctacatgatgtttctcttcggtttagactattaagacaaagtggatttaaggtttcatcaagcatatttgaaaaattcaaagacgagaaaggtaactttaaagaaagcctaataaccgatgtttcaggtttgcttagcttgtatgaggcttcgcacttgagttatgttggagaaagcatactagatgaagcacttgctttcacaaccactcaccttaaggctattgtggcaaataataaagatcatccattatcacatcaaatatccatagccttggaaaggcctctaagaaagaccatagagaggcttcatgctaggttttacatctcaatctatgaaaaggatgcctctcataacaaactattgctagagcttgcaaagttagacttcaatgtacttcaatgtttccacgaaaaggaacttagtgaaattatgaggtggtggaaggagcatgagtttgtaaagaaattcccttttgcaagagataggatggtggaactatatttttggatattgggtgtatattatgaacccaaatactctcgagcaagaaagcttttgaccaaagtcattgcattgacctcaatcactgatgatacttatgatgcatatggtactattgatgagcttgagcttcttaccaaagcaattcaaaggtgggacataacttgtatggataaacttgagccagaatatttaaagacatattataaggtaatgttggaatcttatgaagaatttgaaaaggagcttaaaaaggaagaattatacaaactcgagtatgcaaaagaagagatgaaaagaactattggaggttattttgaagaagctcgatggttgaatgaaggatatttcccaagcttcgatgagcatttgagagtttcatatgtttcttctgctaacgttttgttgatagccacaagttttgtaggaatgcatgatattgtaacacatgaaactctagattggctctctaaagaccctaagattgtttcagcttccactctcctctcaagattcatggatgacataggctctcgcaagtttgagcaagagagaaatcacataccatctacagtggattgttacatgaaacaatatggagtatcagaggaagaggcaattaaagaacttaataaaagagtgatcacccactggaaagaaattaatgaagactttattaggccaactgttgtgccttttcctatcttacttcgtgttcttaattttacaaaagtaatagatcttttttacaaagagggtgatgatcaatacacacgtgttggaaaagcgctcaaagaaagcattgatgctttgcttatagattcaatcccatta

SEQ ID NO: 1357 - DNA, 1668 bp, synthetic construct
  misc_feature 1..1668: note = Description of Artificial Sequence: Synthetic polynucleotide
  source 1..1668: mol_type = other DNA
atgtcatatcaagttttagcctcatcacaaaatgacaaagtatcaaaaattgttcgtccaacaacaacttatcaaccttctatttggggggagagatttctccaatatagtatttcagaccaagatgtaagctataaaaagcagcgagttgacgaattaaaggaagtggtaaggagagaggtatttttagaatgttatgataatgtttcatatgtgttgaagatagtggatgatgttcaacgtttgggattgtcgtatcattttgaaagtgaaatagaaagagcgctacaacacatttacgataacactattcatcaaaaccacaaagatgaagatttacatgacacttctacccgctttagactattgcgccaacatggatttatggtttcatctaatatatttaaaatatttaaagatgagaaagggaattttaaggagtgcttgataactgacattcccggtttgttgagcttatatgaggcctcacagttaagctatattggagagaatatattagatgaatcacttgctttcaccaccactcaccttcatcagtttgtgaaaaatgaaaaaacacatccattatcaaatgaagtattactagccttgcagagacctataagaaagagcctagataggctccacgctaggcattacatttcatcttacgaaaacaagatttgtcataacaaaacattgctagaacttgcaaagttggatttcaatctattacaatgtttgcatagaaaagagcttagtgaaatttccaggtggtggaaagaaatagactttgtacacaaactaccttttgcaagagataggattgtggagctatacctttggctattaggagtttttcatgaacctgaattttcacttgcaagaaatatttcaacaaaagtcattgcattggcctcagttgcagatgatatttatgatgcatatggtacatttgaagagcttgagctccttactgaatcaattaataggtgggacttaaattgtgcggatcaactacgtccagaatgtttacagacattttataaggttcttttaaattgttatgaagaatttgagagtgagcttggaaaggaggaaagttacaaagtttactatgcaagagaagcgatgaaaagattacttggagcatatttcagtgaagctcgatggttgcacgaaggatatttccctagtttcgatgagcatttgaaggtttcattgatttcttgtggatacaccatgatgatagtgacctctttaattggaatgaaagattgtgtaacaaaacaagattttgagtggctctcaaaagaccccaagataatgagagattgcaatatcctttgtaggttcatggatgacatagtctctcataagtttgagcaacaaagagatcattcaccgtctaccgttgagagttacatgaggcaatatggggtgtcagagcaagaggcatgtgatgagctaagaaagcaagtggttaattcatggaaagaaataaacaaagcattcctcaggccttctaatgtgccttatccagttttatctcttgttctcaatttttcgagagtaatggatcttctctacaaagatggtgatggctatacgcatgttggaaaagagacaaaaaatagtgttgttgcgttacttatagatcaaatccca

SEQ ID NO: 1358 - DNA, 1719 bp, synthetic construct
  misc_feature 1..1719: note = Description of Artificial Sequence: Synthetic polynucleotide
  source 1..1719: mol_type = other DNA
tcaagtgcatgctaccccatcatatgtgctgtggtcaatagttctaatgcaattattgatcgacgatctgccaactttgagccctccatttggtcttttgattatattcaatctcttacaagccaatataaggaagaatcttatacaggtcgagtcaaagaattggagatagatgtgaaaaagatgttaattgagatggaaaattctttaattcaacttgaactcattgacacattgcaaagacttggagtatcttatcgttttgaggatgaaataaatactattttgaaagaaaaatatattaatatgatcaataaccctaattataataatttatatgtcactgctcttgaatttaggcttctacgtcaacatggctatgcagtacctcaagagatttttaatcattttaaggaagagataggaaaaatcaaagcgaacatgattagtgatgatattatggaagtattggccttatatgaagcttcattctatgagaaaaaaggcgaaagtattttagaagaagttagaattttcacaactcaatatctaaagaactacattataatgatatcacaagaaagaaagttaatgattgataatgataatgattatgattatgatatcgaaatagtgaatcacgctttggagctcccacttcatcggaggactacaagaacagaagctaagtggttcatcgacgcgtatgagaaaaaacaagacatgaatcctattttgcttgagtttgctaaactcgatttcaacatgatacaatcaacacatcatgacgatctaaaacatatattcaggtggtggaggcatactaaacttggggagttgaattttgcaagagatcgattgatggaatgtttcttatggaaaattggaataagatttgagccaaaattcagttattttagaataacaactgccaaattatttgagctaataacagtaattgatgatatatatgatgtttatggaacattggatgaattagagcttttcaccaaagctattgagagatgggatatggaaatgataaatgagttaccagaatatatgaagatgccttatattgttttacacaataccattaatgaaatggtatttgaggtattaagagaccaacacatctccatcaacattcaataccttaagaaaacgtgggtagatatgtgtagaggttttttacaagaggcaaaatggtactatagtggatatacaccaacactagaagaatatattaaaaatggttggatttcagtgggagcaccggttctaattgtgcatgcttatttttctcatgcaaattataatcacacagttacaagtagtaaagagattttcgaatgctttgaacatggttattatcccgccataattcgtcatagtgccataatattacgacttacaaatgacctagcaacatcatcggaggaactgaaaagaggtgatgctccgacatcaattcaatgttatatgcaagaaaaaaaagtatctgaggagaaagctcgtgaacatattaagtttttaataagtgaaatatggaaagagatgaataatgatgttggattatatccaatctcattgattgaagatgctacaaattttgctaagatgggatttttcatgtatcagcatggtgatggtcatagttctcaagataatcaatccaaacaaaaaatttcatccttgattattgaacctattccctta

SEQ ID NO: 1359 - DNA, 1689 bp, synthetic construct
  misc_feature 1..1689: note = Description of Artificial Sequence: Synthetic polynucleotide
  source 1..1689: mol_type = other DNA
agtactccaatattcaaagatcaaccagcagcaattgtccggcgatcaggcaactacaaacccacattgtgggatgctcattttttcaattcactccaagtcatatatacggaggaaagctatgggaaaagaatcaatgagctgaaagaagatgtgagaagaattcttgagaaggaggctgaaaatcctttagttaagcttgaacagatcaatgatttgagcagacttggaatatcttatcactttgaaaatcaaattaaaacaatattaaacctgacatttaacaataataatgcattgtggaagaaagataatctgtatgccactgctcttcatttcaaactccttagacaatatggattcagtcctgtatcttcagaggttttcaatgtcttcaaagacgagaaaaatgagttcaaggagaatttaagtaaggatgtgaaaggaatggtatgtctatatgaggcttcattctattcatttaggggtgaacccatattagatgaagcaagagatttcacaaccaaacatctcaaacaatacttgatgacgaggcaatgtcaaactaaatctgttgaccatgatgatgatgatgatcttgtgaaacttgtggagcatgccttggatcttccactccattggagattgccaagattggaggctaggtggtttattgatatgtatgctgaaaggaattatgatatgaatccaacttttcttgactttgctaaacttgactataacttcgttcagtcagcataccaaaaagagctcaaatatatttcaaggtggtggagtggttctagattgacagaaaggctaccatttgctagagacagagtagtggaaattttctattctgcagtggcactgaaatatgaggcagaatttgggtttgttagaactgtgatgacaaaaattggtctcttgctaacactcatggacgatatatatgatgtgtatggtacactagatgagcttcagctttttctagaggcaattgagaggtggaatataaatgaactggatcagctacccgattacatgaagatattgtttgttgctttttataacaatgtgaatgagatatcttattatgtcctcaaagaaaatgggattcacaccatcaaatatctaaagaaagcgttgggtgatctgtgtaaatgctatatggaggaggcaaaatggtttcacagtggacacataccaagtttagaagaattcattgagaatggatggaaatcaattacaatacctctttgtcttatctatcattattgcttaattacaacttcaattacagaacaagacatggaacacttgcttcaatatccaaccattttacgtgtctcaggaactgtttttcgatttatagatgacttgggaacctcatcagatgaacttgaaagaggagataatccttcatcaattcaatgctacatgcgtgaaaagggtgttagtgaaaatgaaagccgtgaacacatatggaatttaataagtgaaggatggaaagaaattaatgaagttaaagcttcaacctctccatactctcaagtgtttattgaatctgccattgattttgttagaggagcaatggagatgtaccacaagggtgatggttttggtactaatcaagatcggtatcttaagaccaaagttgtcaacatgttcttcgatccaattccaatt

SEQ ID NO: 1360 - DNA, 1635 bp, synthetic construct
  misc_feature 1..1635: note = Description of Artificial Sequence: Synthetic polynucleotide
  source 1..1635: mol_type = other DNA
cgtcgatcggccaattttcatcctagtatctggggagatcactttctcaaatatacccatcaatcattggaagttgatgataatacaaagcaagaagttgaaaaactaaaagaggaagtgagagggatgctaactgctgcccccagcattaattcttcccaaaagctacagttaattgatacaatccaacggttaggagtcgcttatcattttgagagcgaaatcagtgacattttgggaaaaatgaagaaaatcaatcctcacactgaattggataatagtacccttcatacggtctccctttggtttcgattgcttagacaacaaggatacaacatatcaagtgatatatttgagaagtttacaaacaaaaaaggaaaactggacgatagtgttagtagtgatgttgaaggaatgctaagcttgtatgaagcttcacatatgagaatccatggagagcctatacttgaagaagcagtagttttcaccacaactcatttggtggaggcctctaaggagaaatcccagttgaccatgagctcattatttcttgcggcacaagtcaaccatgccttaagacagcccatcttgaagggcttgccaagagtagaaattcaacgctttatttctctctatcatcacgaccctaaccacagtcatcttttgcttcgctttgctaaattggacttcaacgttctccaaaagttgcaccagaaggaacttcatgaaatttcaaagtggtggaaagacttggactttgcatcgaagctacctttcgcacgtgacagactagtcgagggttatatttggcctgtgggagtatactttgagccaaagtacagtgctgctagggttatattgacaaaagtaattggtgtgacaacaatgattgatgacatttatgatgtttatggaactttagaagaactggaactcttcacagacgcaatagaaaagtgggatataagctgcagtgatcaactccctgattacatgaaatattgttacgaggcactgttaaaattatacgatgaaattgaggaggagttggccatgcaaggcagaacttatcggatggcctatgcaaaggagacaatgaagaagctagctcaatcctactacgtggaagctcaatggtttcataaaaagtacacaccaacgttacaggaatatatggaggttgcactggtgtcatccacgtactacatgctcactgccacgtcattcctaggaatgggagaagaagtctcagctgaggtctttcattggcttatgaactctcctaagattgtaacagcatcagcagtagtttgcagactcatggatgatgtggtcagccacaagtttgagcaagatagaggacacgtggactctagcgtggaatgttatatgaagcaatataatgtaagagaagaagaagcgtgcaaagaattgaagaaacaagttttagatgcatggaaagaaatgaatgaggagtgcatggagccaagagatgtgcccatgtctgtcctcatgcgcgtggtcaatctcggacgagtgatcgatgctgtttacaaagatggagacggttacacccatgccggaggaatcatgaagacttttgtcaaatctttgtttattcaaactcttcccctc

SEQ ID NO: 1361 - DNA, 1656 bp, synthetic construct
  misc_feature 1..1656: note = Description of Artificial Sequence: Synthetic polynucleotide
  source 1..1656: mol_type = other DNA
atgtcaaatattcaagtcttagcttcatctcaattatgtgacaaaattattgctcgtccaacaacaaattttcacccttctatttggggtgatcgattcctccattacaatatttcagaacaagacttggtttgcaaacaagaaaaagttgaagaattaatacaagttgtgaagaaagagatattatcttcaaatcatgatcaattgaagttgattgacaatctccaacgtttgggattatcacatcattttgagagtgaaattgagaaattgttggaacaattaagtatcggcactcatcatcaaaatcatcatgatctacatgatgcttctctttggtttagattattaagacaacatggatttaatgtttcatcaagtatatttgaaaaatttaaggacgctgaaggtaattttaagaaaagcttgataaccgatgtatcgggtttacttagtttgtatgaggcttcacacttgagttatgttggagaaagcatactagatgaagcacttgctttcacaaccactcaccttaaggctattgtggcaaatagtaaagatcatccattatcacatcaaatatccatagccttgcataggcctctaagaaagaccatagagaggcttcatgctaggttttacatctcaatctatgaaaaggatgtctctcataacaaagtattgctagaccttgcaaagttagatttcaatctacttcaatgtttccacaaaaaggaacttagtgaaattatgaggtggtggaaggagcatgagtttgtaaagaaattcccttttgcaagagataggatggtggaactgtatttttggatattgaatgtatattatgaacccaaatactctcgagcaagaaagcttttgaccaaagtcattgcattgacctcaatcactgatgatacttatgatgcatatggtactattgatgagcttgagcttcttaccaaagcaattcaaaggtgggacataaattgtatggataaacttgagccagaatatttaaagacatattataaggtaatgttggaatcttatgaagaatttgaaaaggagcttaaaaaggaagaattatacaaacttgagtatgcaaaagaagagatgaaaagaactattggaggttattttgaagaagctcgatggttgaatgaaggatatttcccaagcttcgatgagcatttgagagtttcatatgtttcttctgctaacgttttgttgatagccacaagttttgtaggaatgcatgatattgtaacacatgaaactctagattggctctctaaagaccctaagattgtttcagcttccactctcctatcaagattcatggatgacataggctctcgcaagtttgagcaacagagaaatcacataccatctacagttgattgttacatgaaacaatatggagtatcagaggaagaggcaattaaagaacttaataaaagagtggtcacctactggaaagaaattaatgaagactttattaggccaactgttgtgccttttcctatcttacttcgtgttcttaattttacaaaagtagcagatcttctttacaaagagggtgatgatcaatacacaaatgttggaaaagtgctcaaagaaagcattgctgctttgcttatagattcaatcccatta

SEQ ID NO: 1362 - DNA, 1668 bp, synthetic construct
  misc_feature 1..1668: note = Description of Artificial Sequence: Synthetic polynucleotide
  source 1..1668: mol_type = other DNA
atgtcatatcaagttttagcctcatcacaaaatgacaaagtatcaaaaattgttcgtccaacaacaacttatcaaccttctatttggggggagagatttctccaatatagtatttcagaccaagactttagctataaaaagcagcgagttgacgaattaaaggaagtggtaaggagagaggtatttttagaatgttatgataatgtttcatatgtgttgaagatagtggatgatgttcaacgtttgggattgtcgtatcattttgaaaatgaaatagaaaaagcgctacaacacatttacgataacactattcatcaaaaccacgaagatgaagatttacatgacacttctacccgctttagactattgcgccaacatggatttatggtttcatctaatatatttaaaatatttaaagatgagcaagggaattttaaggagtgcttgataactgacattcctggtttgctgagcttatatgaggcctcacatttaagctatattggagagaatatattagatgaagcacttgctttcaccaccactcaccttcatcagtttgtgaaaaatgaaaaaacacatccattatcaaatgaagtattactagccttgcagagacctataagaaagagcctagagaggctccacgccaggcattacatttcatcttacgaaaacaagatttgtcataacaaaacattgctagaacttgcaaagttggatttcaatctattacaatgtttgcatagaaaagagcttagtcaaatttccaggtggtggaaagaaatagactttgtacacaaactaccttttgcaagagataggattgtggagctatacctttggctattaggagtttttcatgaacctgaattgtcactggcaagaattatttcaacaaaagttattgccttggcctcagttgcagatgatatttatgatgcatatggtacatttgaagagcttgagctccttactgaatcaattaataggtgggacttaaattgtgcggatcaacttcgtccagaatgtttacagacattttataaggttcttttaaattgttatgaagaatttgagagtgagcttggaaaggaggaaagttacaaagtttactatgcaagagaagagatgaaaagattacttggagcatatttcagtgaagctcgatggttgcacgaaggatatctccctagcttcgatgagcatttgaaggtttctttgatttcttgtggatacaccatgatgatagtgacctctttaattggcatgaaagattgtgtaacaaagcaagattttgagtggctctcaaaagaccccaatataatgagagattgcaatatcctttgtaggttcatggatgacatagtctctcataagtttgagcaacaaagagatcattcaccgtctaccgttgagagttacatgaggcaatatggggtgtcagaacaagaggcatgtgatgagctaagaaagcaagtgattaattcatggaaagaaataaacaaagcattcctcaggccttctaatgtgccttatccagttttatctcttgttctcaatttttcgagagtaatggatcttctctacaaagatggtgatggctatacgcatattggaaaagagacaaaaaatagtgttgctgcgttacttatagatcaaatcccg

SEQ ID NO: 1363 - DNA, 1713 bp, synthetic construct
  misc_feature 1..1713: note = Description of Artificial Sequence: Synthetic polynucleotide
  source 1..1713: mol_type = other DNA
attacaggactaatctccactactactttcaaagaacaaccagcaatagtccgtcgatcaggaaactacaaacccccattgtgggatgctcattttatccaatcactccaagtcatatatacggaggaaagctatgggaaaagaatcaatgagctgaaagaagatgtgagaagaattcttgagaaggaggctgaaaatcctttagttaagcttgaacagattaatgatttgagcagacttggaatatcttatcactttgaagatcaaattaaggcaatattaaaccttacatataataataataatgcattgtggaagaaagataatctgtatgccactgctcttcatttcaaactccttagacaatatggattcaatcctgtatcttcagagattttcaatgctttcaaagacgagaaaaaggagttcaaggagagtttgagtaaagatgtgaaaggaatggtatgtctatatgaggcttcattctattcatttaggggtgaacccatattagatgaagcaagagatttcacaaccaaacatctcaaacaatacttgatgatgacgaggcaaggtcaaaatgttgaccatgatgatgataatgatttaatggtgaaattagtggagcatgctttggagcttccagtgcattggagaatgaaaaggttggaggcaaggtggtttattgatatgtatgctgaaatgtctcatcatcatcatatgaattcaacttttcttcaacttgctaaactagattttaacgttgtacaatcaacataccaagaagaccttaaacatgttgtaaggtggtggaaaactactagtctaggagagaggttaccctttgcaagagataggatagttgaaattttcttatggagtgtgggacttaaatttgagccacagtttagatattgccgaaaaatgctcacaaagattggtcaattggtaacgacaatggacgatatatttgacgtgtatggtacgcttgatgagctaagcctctttcaacacgcattgggaaggtgggatataaatacgatcgaccaacttccagattacatgaagatattttttttggctacttataatgtggtgaatgaaatggcgtatgacgtgctaaaacaaaatggcattctcattatcaaatatttaaagaaaacgtggacggatttatgtaaatgttacatgttggaggcaaattggtatcatagtggatacacaccaagcttggaagaatacattaaaaatggatggatatcaattgcagaacccttaattctagtcaatctttattgccttataaccaatccaataaaagaagatgacatagactgcttgcttcaatatcccacctttattcgtatctcaggaatcattgctcgacttgttgatgatttaggaacttcatcggatgaactgaaaagaggagacaatcctaaatcgattcaatgctatatgaaagaaaatggtatttgtgatgaaaagaatggccgtgaacacataaggaatttaatcagtgaaacatggaaggaaatgaatgaagctcgagtgggtgagtctccattttctcaagcttttattgaaactgccatagatttcgttaggacagcaatgatgatataccaaaaggagcaagatggggttggtactaatattgatcattacacaaaagatggaatcatttccttgttcttcacttccattcccatt

SEQ ID NO: 1364 - DNA, 1854 bp, synthetic construct
  misc_feature 1..1854: note = Description of Artificial Sequence: Synthetic polynucleotide
  source 1..1854: mol_type = other DNA
atggcttttcaccaatttgctccatcatcatccctccctatttggagtagaattaataatcgttttacaccaaaaacttctattattacttctatttcaaaaccaaaatcaaacttgaaatcgagatcgagatcaagtacttgctaccccatacaatgtactgtggtcgataaccctagttctacgattactaataatagtgatcgaagatcagccaactatggacctcccatttggtcttttgattttattcaatctcttccaatccaatataagggagaatcctatacaaggcaattaaataagttgaagaaagaagtgacaagatggcttggactggaaattaactctttagccctacttgagctaattgattacattgcaaaggcttggaatagcttaccatttaagaatgaaataaacactattttgaaggaaaaatacacggataattatattaacaataaaattattactaaccctaattataagaatttatatgccattgctcgcgaatttaggcttctacgccaacatggctatacagtacctcaagattttaatgctttcaaggataagagagggaaatttaaaacatgcttgagtgatgatattatgggagtattgtgtttatatgaagcttcattctatgctatgaaacatgaaaatattttggaggaagcaagaattttttcaactaaatgtcttaaaaaatacatggagaaaatggagaatgaggaagagaaaaaaatattattagatgataataatattaatagtaattgctataattaatcacgctttcgagcttcgcttcattggagaataacaagatcggaagctaggtggttcattgacgaaattatgagaaaaaacaagacgtgaattcgacttgtttcgaggttgcgaattagattttaatatagggcaatcaaacaccaagaagatttacaacatttatcgaggtggtggaggggattgtaaacttggtgggaaatgaattttgctagcgatagattgatggaagctttcttatgggatgttggaaaattcgaggagaatttcagctattttagagaataaatgcaagattatttgtgctttataacaataattgatgatatttatgatgtatatggaactttggaggaattagagcttttcactagtgctgttgaaagatgggatgtgaaattaatcaatgagttaccagattacatgaagatgcctttctttgttttaaataccataaatgagatggggttcgatgtattagtacaaaactttgtcaacattgaataccttaagaaatcggtatgtagattatgtaaatgttatttacaagaagcaaaatggtattatagtggataccaaccaacattggaagaatacactgagttgggttggctttcaataggagcatcagtaattcttatgcatgcttattgtttcacaaatcctataacaaaacaagacttgaaaagtttgcaattgcaacattatcccaacataattaaacaagcatgcttgattacaaggcttgcagatgatttaggaacatctcgggatgaattgaatagaggcgacgttcctaaatcgattcaatgttacatgtacgataataatgctaccgaagacgaagctcgtgaaatcaagttcttgataagtgaaacatggaaggatatgaataagaaagatgaagatgagagttgtttatcagaaaattttgttgaagtttgcaaaaatatggctagaacagcactattcatatatgagaatggagatggacatggttctcagaatagtttatcaaaagaacgtatttcaaccttgattattactccaattaatatc

SEQ ID NO: 1365 - DNA, 1695 bp, synthetic construct
  misc_feature 1..1695: note = Description of Artificial Sequence: Synthetic polynucleotide
  source 1..1695: mol_type = other DNA
agtactccaatattcaaagatcaaccagcagcaatcgtccgccgatcaggaaactacaaacccacattgtgggatgctcattttttccaatcactccaagtcatatatacggaggaaagctatgggaaaagaatcaatgagctgaaagaagatgtgagaagaattcttgagaaggaggctgaaaatcctttagttaagcttgaacagatcaatgatttgagcagacttggaatatcttatcactttgaagatcaaattaagacaatattaaacctgacatttaacaataataatgtattgtggaagaaagataatttgtatgccactgctcttcatttcaaactccttcgacaatatggattcagtcctgtatcttcagaggttttcaatgccttcaaaaacgagaaaaaggagttcaaagagagtttgagtaaggatgtgaaaggaatggtatgtctatatgaggcttcattctattcatttaggggtgaacccatattagatgaagcaagagacttcacaaccaaacatctcaaacaatacttgatgacaaggcaaagtcaatttactagagttgaccatcatgatgatgatgatcatgatcttgtgaaattggtagagcatgccttggatcttccactccattggagattgccaagattggaggctaggtggtttattgatatgtatgctgaaaggaattatgatatgaatccaacttttcttgactttgctaaacttgactataacttcgttcagtcagcataccaaaaagagctcaaatatatttcaaggtggtggagtggttctagattgacagaaaggctaccatttgctagagacagagtagtggaaattttctattctgcagtggcattgaaatatgaggcagaatttggatttgttagaactgtgatgacaaaaattggtctcttgctaacactcatggacgatatatatgatgtgtatggtacactagatgagcttcagctttttctagaggcaattgagaggtggaatataaatgaactggatcagctacccgattacatgaagatattgtttgttgctttttataacaatgtgaatgagatatcttattatgtccttaaagaaaatgggattcacatcatcaaatatctgaagaaagcgttgggggatctgtgtaaatgctatatggaggaggcaaaatggtttcacagtggacacataccaagtttagaagaattcattgagaatggatggaaatcaattacaatacctctttgtcttatctatcattattgcttaattacaacttcaattacagaacaagacatggaacacttgcttcaatatccaaccattttacgtgtctcaggaactgtttttcgatttatagatgatttgggaacctcatcagatgaacttgaaagaggagataatccttcatcaattcaatgctacatgcgtgaaaagggtgttagtgaaaatgaaagccgtgaacacatatggaatttaattagtgaaggatggaaggaaattaatgaagttaaagcttcaaactctccatactctcaagtgtttattgaatctgccattgattttgttagaggagcaatggagatgtaccacaagggtgatggttttggtactaatcaagaccgatatcttaagaccaaagttgtcaacatgttcttcgatccaattccaatt

SEQ ID NO: 1366 - DNA, 1761 bp, synthetic construct
  misc_feature 1..1761: note = Description of Artificial Sequence: Synthetic polynucleotide
  source 1..1761: mol_type = other DNA
atgcaaatggcaggagtgaagttcattagctactcatctttatactcggctactttctcaaagaggccatcgaagaagaattataagcttcctcgttttggtaatccattattcatgtcaacaaaatgccagagtatatcatcatcatcatcaccaccaccattattgtcaatagatcatgatccaggggacatagaatggattttattgaataattagatggtcgctgattattatgacaattataagagtactacctcggaagagctgttgatcaaaaaggttgaaatggcattacgaaaacctactgatgatcaaagttacaaaatgaggctcatagatagcatccaacggttgggagttggccattatttcgaagaagaaatcaaagtaatccttcagatgttgtcagatttcaattccggccaagatgacctctttaacacggggcttcgttttcggctactcaggcataatggctttccaactacctcagatgtttttgacaaattcatcaaccaaaaaggagaaatagaggatgtaataatgggccaagacacattgggtatgctgagcttgtatgaggcatcctaccttgcagcaaattgtgaagaatcattggtgaaggcaatggaattcacaagatctcatctgaaaagttcgatgcctttcataacccaaaagctacaaaatgaagttgccaaagccttggagctccctagacacctgaggatggcaccattagaagctcgaaactacatcgacgaatatggcaaagaattaaaccactgccctgctcttcttgacttagccaagttagaatttaacgagcttcagtcactccacaaaagagaattaaccgagatcataaggtggtggaaacagttgggtctggttgagaaacttggttttgcaagagatcgacccttagaatgttttctatgggtagtgggaatattccctgggaaatgctattccaacgtccggattgagctggccaaaactgtttcaatcttactagtcattgatgatatctacgacacttacggatctttggatgaactccacttgttcaatcatgcaattctaagatgggatcttggtgcaatggacaagcttcctgagtacatgaaaatatgttacatggcactatacaatactactaatgaaattggctacagagttctcaaagaacatggattatgcgttacacaacacttaaagaaagtgtggttagacatatttgatgcatttctaaccgaagcagaatggttcgacaaaaaatacactccaactctagagcaatatttaacaaacggcgtaactagtggaggatcctacatggccttagtgcactcatttttcctcataggtcatggtattacagaccaaactatatcaatgatgcacccatatcctgagatcttctcccactcaggcaaaattctaagactttgggatgatttgggaacagccaaggaggagcaagagagaggagatgttgcttctagcatagattgttatatgaaagaagagaatattgaatcggaagatgaggccagaaaacacatcaagaaactgattagaagctcgtggatagagctaaacggagagttgaaggctcctagtgcattgcctcggtcgatcaccacggcctgttttgaccttgctagaacagcccaagtcatctatcaacatggagatgatcaaagctttttaagcgtagaagatcatgtacaatctttgttttttcgaccctgt

SEQ ID NO: 1367 - DNA, 1710 bp, synthetic construct
  misc_feature 1..1710: note = Description of Artificial Sequence: Synthetic polynucleotide
  source 1..1710: mol_type = other DNA
atgtccaaccaaataatattggcatcatcaaaaaatgagaaaatacataaaattgttcgaccaacaaaaaattatcatccatctatttggggagatcgatttctacattacaatatttcagaagaagagttgagttataaacaaggccaagttgaagaattgaaagaagtagtaagaaaggagatatttggagaattattatgtgatgattggaataatcgattgaagttaattgatgtggtagaacgtttgggattgtcctatcattttgagagtgaaatacaaaatgagcttcaacaaatttacaacaaaataaggattaatgatactaatttaaaacatgaaactttgcatgatgcttctattcggtttagacttctacgacaacatggatacagggtttctttagatatatttgacaagttcaaagatgagaatggcaactttaaagaatgtttggcgagtgacactcttggtttgcttagcttatatgaggcctcacatttgagttgcgtcggggaagatttactaaatgaagccttgtcttttacgaccagacacctaattgagtttttggcaaataataaaaaagaacaatgcgatgatgatgatgatcttttatcgaaagaaatatctcgagccctggagagacccttaagaaaaaccctaaacaggctccaagctaggcatttcatttcaatatatgaaaaagtggccttacataaccaagcattgctacaacttgcaaaattagatttcaatttattacagtccatgcacaaaaaggagcttagcgaaaactccaggtggtggaaagaatcagactttgtacacaaattcccttttgcaagagacaggagtgtggaactatacctttggatattagcagtctattatgaaccccaatactatttggcaagaataattttattcaaaattatttcctttgccacaatagctgatgacatttatgattcatatggtacttttgaagaacttaaactcctaactgatgtagttaaaaggtgggacataaatgagattgataaactcaatccaggatgttttcaagtattttataaagaacttttgatttgttatgaagaatttgagcaagggcttacaaaggaagaaacttacagagttcattacgcaaaagaagagtttaaagaatttctccaaggttatctggatgaagcttggtggttaaagaaagctgaacgcattccaagttttgatgagtatttgaaatttggtttggtcaattgtggttacttaatgttgacagtgagctctttaattggaatgaaaagtaacaatattgtaaccaaacaagtttttgagtggctctccaaaggccccaagattatcaatgcatccactactatttgtcggcttatggatgacatagctgaacacaagaatgagcaagagagaaatcatgtaccatctacaatagaatgttacatgaaacaatatggcgtatcagaagaagaaacatgtgatgaaatgaataggcgagtggttattgcatggaaagaaataaacgaagagtttctgaaaccaactgaagcagcttcacctatattagttcgtgccctgaatcttgcaagggttatagatcttctctacaaaaatggtgataactatacacaagttggaaaagttaccaaagataacgttgctgtcttgctcattgattcaattcca

SEQ ID NO: 1368 - DNA, 1857 bp, synthetic construct
  misc_feature 1..1857: note = Description of Artificial Sequence: Synthetic polynucleotide
  source 1..1857: mol_type = other DNA
atagcttttcaccaatttgcttcatcatcatccctccctatttggagtagtattgataatcgttttacaccaaaaacttctattacttctatttcaaaaccaaaaccaaaactaaaatcaaaatcaaacttgaaatcgagatcgagatcaagtacttgctaccccatacaatgtactgtggtcgataaccctagttctacgattactaataatagtgatcgaagatcagccaactatggacctcccatttggtcttttgattttgttcaatctcttccaatccaatataagggtgaatcttatacaagtcgattaaataagttggagaaagatgtgaaaaggatgctaattggagtggaaaactctttagcccaacttgaactaattgatacaatacaaagacttggaatatcttatcgttttgaaaatgaaatcatttctattttgaaagaaaaattcacaattaataatgacaaccctaatcctaattatgatttatatgctactgctctccaatttaggcttctacgccaatatggatttgaagtacctcaagaaattttcaataattttaaaaatcacaagacaggagagttcaaggcaaatataagtaatgatattatgggagcattgggcttatatgaagcttcattccatgggaaaaagggtgaaagtattttggaagaagcaagaattttcacaacaaaatgtctcaaaaaatacaaattaatgtcaagtagtaataataataatatgacattaatatcattattagtgaatcatgctttggagatgccacttcaatggagaatcacaagatcagaagctaaatggtttattgaagaaatatatgaaagaaaacaagacatgaatccaactttacttgagtttgccaaattggatttcaatatgctgcaatcaacatatcaagaggagctcaaagtactctctaggtggtggaaggattctaaacttggagagaaattgcctttcgttagagatagattggtggagtgtttcttatggcaagttggagtaagatttgagccacaattcagttactttagaataatggatacaaaactctatgttctattaacaataattgatgatatgcatgacatttatggaacattggaggaactacaacttttcactaatgctcttcaaagatgggatttgaaagaattagataagttaccagattatatgaagacagctttctactttacatacaatttcacaaatgaattggcatttgatgtattacaagaacatggttttgttcacattgaatacttcaagaaactgatggtagagttgtgtaaacatcatttgcaagaggcaaaatggttttatagtggatacaaaccaacattgcaagaatatgttgagaatggatggttgtctgtgggaggacaagttattcttatgcatgcatatttcgcttttacaaatcctgttaccaaagaggcattggaatgtctaaaagacggtcatcctaacatagttcgccatgcatcgataatattacgacttgcagatgatctaggaacattgtcggatgaaatgaaaagaggcgatgttcctaaatcaattcaatgttatatgcacgatactggtgcttctgaagatgaagctcgtgagcacataaaatatttaataagtgaatcatggaaggagatgaataatgaagatggaaatattaactcttttttctcaaatgaatttgttcaagtttgccaaaatcttggtagagcgtcacaattcatataccagtatggcgatggacatgcttctcagaataatctatcgaaagagcgcgttttagggttgattattactcctatccccatg

SEQ ID NO: 1369 - DNA, 1782 bp, synthetic construct
  misc_feature 1..1782: note = Description of Artificial Sequence: Synthetic polynucleotide
  source 1..1782: mol_type = other DNA
gtattttttagaccaaaattatatactaattataatattattaatggtggtacaaaatcaagattatcaagtgcatgctaccccatccaatgtgctgtggtcaatagttctaatgcaattattgatcgacgatcagccaactttgagccctccatttggtctttcgattatattcaatctcttacaagtcaatataagggagaaccttatacaagtcgagtgaaaaaacttgagagagatgtgaaaaaaatattagttgagatggaaaactctttagctcaacttgaactcattgatacattgcaaagacttggaatatcttaccgttttgagaatgaaataaattctattttgaacaaaaaatatctcaatattaataatcctaattataatttatatgctattgctcttcaatttaggcttctacgtcaacatggctatgcagtacctcaagaaatttttaatcagttgaaggacgagatagaaaaaatcaaagaaaacataaatggtaatgatatcatgggaatattagccttatacgaagcttctttttatgagaaaaaagacgaaagtattttaaaggaagctagaattttcacaactaaatgtctcaaaaactacactataatgatatcagagcaaaaaaagttaatgattgataatgattatgattatgatatcgaagtagtgaatcatgccttagagctcccacttcatcggaggaccacaagaacagaagcaaagtggttcattgacgcatatgcgaaaaaacaagacatgaatcctatgttgcttgagttagccaaactcgatttcaacatagtacaatcaacacatcatgaagatctaaaacatatattcaggtggtggagacatactaaacttggagagaaattgaattttgcaagagatcgattgatggaatgtttcttatggaatattggaataagatttgagtcaaaattcagctattttagaacaaaaactgccaaattatttgagctagtaacatttatagatgatatatatgatgtttatggaacattggatgaattagagcttttcaccaaagctgttgagagatgggatgtgaaaatgataaatgagttaccagaatacatgaagatgccttatcttgttttacacaataccataaatgatatggtatttgaggtgttaagagaccaagaaatctccatcaacattcaataccttaagaaaacgtgggtcgatatgtgtaaaagtttcttgcaagaggcaaaatggtactatagtggatacacaccaacattggaagaatatattgaaaatggttggatttcagtaggagcaccagttattcttgtgcatgcttatttttttcacgcaaataataatggcacaattacaaatactaaagagattttcgaatgcttggaatatggttattatcctgccattattcgtcacagtgccataatattacgatttacaaatgacctagcaacatcatcggaggaattgaaaagaggtgatgctccgacatcaattcaatgttacatgcaagaaaaaaatgtatctgaagaggaagctcgtgaacatattaagtttttaataaatgaagcatggaaggagatgaataatgatgttggattatatccaatctcattgactgaagatgctacaaactttgctaagatgggatttttcatatatcaacatggtgatggtcatagttctcaagataatcaatccaaacaaaaaatttcatccttgattattgaacctattcccctatataca

SEQ ID NO: 1370 - DNA, 1701 bp, synthetic construct
  misc_feature 1..1701: note = Description of Artificial Sequence: Synthetic polynucleotide
  source 1..1701: mol_type = other DNA
atgtcgtctcaaatcttagcaacctcatccaaaaatgacaatatacataaaattgttcggccaacaacaaattatcatccttctatttggggagaccgatttttgcattacgatattccaaaagaagaattgaattataaacaaggccaagttgaagaattgaaagaagtggtaagaaaggagatatttggagaattattatgtgatgattggaataatcgattgaagttaattgatgtggtagaacgtttgggattgtcctatcattttgagagtgaaatacaaaatgagcttcaacacatttacaacaaaataagcattaatgatactaatttcaaacatgaaactttgcatgatgcttctattcggtttagacttctacgacaacatggatatagggtttctttagatatatttgacaagttcaaagatgagaatggaaactttaaagaatgtttggcgagtgacaccgttggtttgcttagcttatatgaggcctcacatttgagctgtgttggagaaaatttactagatgaagccctttctttcactaccaaacacctaactgaatttttggaaaataataaaaaagaacaccccaatgatgatcctttatcaaaggaaatatctcgagccctagagaggcccttaagaaagaccctagtgaatctccatgcaaggtatttcatttcaatatatgaaaaagatgcctcacataacaaagtattgctacaacttgcaaagttagatttcaatctattacaatccatgcacaaaaaggagcttagtgaaatctccaggtggtggaaggaattagacagtgcacacaactttccatttgcaagaaataggattgtggaactatacatttggatattaggagtctattatgaaccccaatactcttttgcaagaaatattttagtgaagatcatagcactttcctcaatcgctgatgatatttatgattcatatggtatatttgaagaacataagctccttattgaagcaattgataggtgggacaaaaattgtatggataaactccatccagaatacttgcagaaatattataagatacttttgcaatcttttgaggaatttgaacaagagtttgaaaaggaggaaacttacaaagtttactatggaaaagaaacgtttaaaagattattaagaggttattttgaggaagctcgatggttgaatgaaggatacatgccaagtttggaggagcatttaaaagtttctttggttacttctggttatttcatgttgatggcttgctctttagttggaatgaaaagtaacaatattgtaaccaaacaagttttcgagtggctctccaaagaccccaagattgttagggcaagcgctagtgtttgcaggtacatggatgacgtggctggtcacaagaatgagcaagagagaaatcatataccatctacaatagaatgttacatgaagcaatatggtgtatcagaagaagaagcatgtgatgaaatgaataggcgagtggttattgcatggaaagaaataaacgaagagtttctcaaaccaactgaagcagcttcacctatattagttcgtgctctgaatcttgctagggttatggatcttctctacaaaaatggtgataactatacacaagttggaaaagtcactaaagatagtgttgctgtcttgctcattgatccaattcca

SEQ ID NO: 1371 - DNA, 1935 bp, synthetic construct
  misc_feature 1..1935: note = Description of Artificial Sequence: Synthetic polynucleotide
  source 1..1935: mol_type = other DNA
atggctgcattagtgtccactgtaagtagtattattaggtggaatagtaataataataataataataataccttcactagatctgtgaaatcatgtttaagttcaaattaccataataataataatattattcatagtaataaaactgtattgatgtccaccaataataataataataataataataagaatagttctcgaagatcagcaaactatcaacccccactttggcaatttgattatgtacaatcactttctactcctttcaaggatggagcatatgtcaaaagagttgagaaagtaaaggaagaagtaagagtgatggtgaagagagcaagagaggaggagaagcctttatctcaacttgagctaattgatgtattgcaaagacttggaatctcttatcactttgaggatgaaattaatgatatattgaaagttatatataacaacaataatgtgtacaacaccaacaaaaataatgtgtatgccaattctcttgaatttagactcctacgacaacatggttatccggtgtctcaagaaatttttagtacgtgcaaagatgaaagaggcaattttatggtgtgtaccaatgatatcaaaggaatgttatctttatatgaagcttcattctatttggtagaaaatgaagatggtattttggaagagacaagacacaaaacaaagaaatatcttgaggaatacataatcatgatcatggaaaaacaacaatcattattagatcaaaataataataatgattatgattatgataattatgattatgaactagtgagccatgcattggagcttccacttcattggagaatgttaagattggagagtaggtggtttattgatgtgtatgagaagagactagacatgaaccctactctacttaccttagctaaactagatttcaacattgtccaatcaatataccaagatgatcttaaacatgtcttcagctggtgggaaagcactgatatgggaaagaagttggaatttgcaagagatagaacaatggtgaatttcttatggacagtaggagttgcatttgagccacatttcaaaagttttagaagaatgattacaaaagtaaatgctttaattacagtaatagatgacatatatgatgtttatggtacactagatgaattggagctcttcactaatgcagttgagagatgggacattagtgctatggatgggctccctgagtatatgaagacatgttttcttgctttatacaatttcataaatgatcttccatttgatgtgttaaaaggagaagaaggcctccatataataaaattccttcagaaatcgtgggcagatctttgcaaatcttatttaagagaagcaagatggtattataatgaatacacaccaagatttgaagagtacattgagaatgcatggatatcaatatcaggacctgttatactatcacatttatacttttttgtagtgaatccaaacatggaagatgccttattaagtacttgctttgatggataccctaccataatacgacattcatcgatgattttacgacttacagatgatctgggaacttcaacggatgaattgaaaagaggcgatgttcctaaatcaatccaatgcaaaatgtatgaagatggtatatctgaagaggaagctcgtcaacgtattaagttattaataagtgaaacatggaagcttattaataaagattacataaatttggatgatgatgatgatggtggtgatgactactctccaatgttctataagtctaataatattaataaggctttcattgaaatgtgtttaaaccttggtagaatggcacattgcatttatcaatatggagatggacatggaattcaagatcgccaaacaaaagatcatgtactatcattacttattcaccctattcctcttacccaa

SEQ ID NO: 1372 - DNA, 2541 bp, synthetic construct
  misc_feature 1..2541: note = Description of Artificial Sequence: Synthetic polynucleotide
  source 1..2541: mol_type = other DNA
gaattccaatctttgccccaaactcaggctaagttgatcaacgagatcaaagaaacgatgttctcatcgttagacatcaatccttactccctcgtttctccttgtgcttacgacactgcatggctagccatgataccacatcctaaccaaccttcgaagcctatgttcgagggttgtttgagttgggtgcttaacaaccaaaccgaacatggcttctggggtaactgtgatgaccagagtggcatgccaaccctagagtgtctgactgccactctggcttgtgttgttgccctaagaaagtggaatgttggttcttccatgataagtaaagggttggaatttattcattcatctaatgcaaaaaggctcttaaaagaaatgaaaaaagaaggctttattcctcaatggtttgcaatcgttttcccgggaatggttgaattggctgaagaagttctcaaaatccaaatcttaaaggatcaatccgttttcgtttcggacatattttaccataggcaactcattttcaaaaagtacatatatttagagctacataataaggagacatatttgttatcatatcttgaagtgttgccatcatcatattttaatgaagaattaataataaaaaaattgtgtgaaaagggttctttgttccaatctccatcggcaacagcacaagctttcatggcaactgaaaattccaaatgcttgcattatttgcaaaccctagttcacaagttttccaataataacaacaataatatcattggagttcccactacatatcccatggacaaagatcttataaagctttgcattatcaactatgtcgaaagattagggttagctgagcatttcgctatcgaaatcgaacaacttctacaacaagtttataagaattatgtgaaatgcgatggagaattttattacgaaaaaagttactattcattggcaactttagagttacacctactcaaagaatcattagcttttaggcttctaaggatgcatggctacaaagtttttcctagtaacatctattggattttgaagaatgaggatataaaaaatcacatagaatcaaactatgaatgcttttcggttacgatgttgaatctttacagagctactgatcttgcttttcatggtgaatttgagcttgatgaactaagaatattttcgagaaaactacttcaaaagtctattttagtaggagctccacatacaaatccttttaacaaactgattgagaatgagttaagtcttccatggatggctcgactagatcacttggaacatagactttttattgaacaaactaatgaagctcaatcatctttatggatgggaaagacttctttccaaaggttgtcgaggtttcacaacgacaaactagttcgtctagccaccttaaattatgagttcaaacaatctatttacaagaccgaacttgaacaattaacaaggtggtgtaaatattggggacttaatgaaatgggatttggtagagaaaaaagtacatactgttattttgcagtagcttcagcttgttgttctttgccttatgattctccaattcgattgatggttgcaaagggtgctataataataacaattacagatgatttttttgatatgaaagaatctctaatcactgagttaaaaacttttactaaggcctttcaaaggtgggatggtaaagaattgagtggtgttagtaagaaaatatttgatgccctagataatctttggtatgaaacgatttgttcatggcttactgaatcggagtggagtaaaaatgggattgtaccaaccatggatgaatatcttaaagttggaatgacttccatagcaactcacaccttgcttcttccagcttcttgttttgtaataaatccaactttaccggtctactctcaattacgaccaattcaatgtgagagtgttacaaaactcgtcatgactatttgtcgtctgttaaatgacttacaaagttatgagaaggaaaaagaagaaggcaaaccaaactcaattactgtgtacatgaagaacaattctgaggtagaaatggaagaagcagtaaagtacgtgaaagagatattaaacaagaagaagaaagagttactcgaacatgttatgattgatggctttaccaatctttcaaaagagtgtaggcttctacacctctcttgcttaaaagtatttcaaatgttcttcaactcttcgaatcgatatgattcagacactgaaatgcttgacgacattagcaaagcaatctatgttcctttgaaatcaattgatcatgaaggactcgaaaagaatctcttaaggcctccaaagtcaccgatgattgatcttactcgagtcaaatcaacgaccatgaaatgttcgatgaacatgaataaatttagtcaaccctctaaatgtctaaccgctaaatattttgtcatgaatgagctttctcttcataaacacaacaaggttgagaacttgaaaataactacacctactatgccttcaaaactcaattttttctttatt

SEQ ID NO: 1373 - DNA, 1683 bp, synthetic construct
  misc_feature 1..1683: note = Description of Artificial Sequence: Synthetic polynucleotide
  source 1..1683: mol_type = other DNA
atgtctagtcaagtgttagcttcatctcaaaaaaatgacaaaacacaaaacatcattcgaccaacaacaaaatttcacccaccaatttggggagatcgattcctccattacaatatttcagaacaagagttggaatataaagagggacaagttgaagaattgaaagaagttgttaggaaagagatattccatggaaataataaaagaaatattattaatgtttcgaaacaattaaagttaattgatgatgtggaacgtttgggattatcttatcattttgaaagtgaaatagaaaaaaagctacaacacatttatgatcaacactactactactccaaccatgatgaagatctacatgatgtctctattcgatttagattactacgacaacatggatttaacatttcatctacagatatatttgagaaattcaaagatgagagtggtaagtttaaggaaagcttgaaaagtgacattgaaggtatgcttagcttgtatgaagcttcatacttgagctatgttgaagaaaatatactagatgaggctcttgctttcactaccaccaatcttaagttagtggccaacaaaaaagaacatccattatcacatgaaatatccttagccttatataggcctttgagaaaaaccctagtgaggctttatgctaggcattacatttcaatctatgagaaacaaccttctcataacaaagtattgctacaatttgcaaagttggacttcaatctactacaatctttgcataagaaggagcttagtgaaatttccaggtggtggaaagaattagacttggcaaacaaactaccatttgcaagaaataggattgtggagctatacctttggatactaggagtctttcatgaacctcaattctctcttgcaagaaaaatcttaattaaagccatttcaatggcctcagttgcagatgatatttatgatgcatatggtacatttgaagaacttgagctcctcaccgaagcaattctcaggtgggacataagttttatagataaacttagtccagattatttgaagacatattataaggtatttttgaattcttatgaagaatgtgaaaaagatcttaaaaaggaagagagatacaaacttcactatgcaaaagaatcgatgaaaaaattaatacaagcttatttccatgaagcacaatggttgaaccaaggacatttcccaagctttgatgagcatttgaaagtttcttttgtgtcttctggttacccaatgttgattgagacctcttttgttggaatgcaagatgttaaaacaaatcaagtatttgaatggctctctacacaaccaaagatttttagagcttgcactatcatttctagattcatggatgacctagtttctcgtaagttcgagcaagagaggaatcacgtaccatctacagtagattgctacatgaagcaatatggtgtatcggaacaagaggcatgtgatgagctcaataaacaagtggttaatctatggaaagaaataaaccaagagtttcttaggccaacttctatgccttcatctatcttagttagaattcttaatttcacaaaagtgcttgacattatctacaaagaaggtgatggctatacacatgttggaaaattggttaaggacagtgttgctgcgttgcttatagatcccatccca

SEQ ID NO: 1374 - DNA, 1329 bp, synthetic construct
  misc_feature 1..1329: note = Description of Artificial Sequence: Synthetic polynucleotide
  source 1..1329: mol_type = other DNA
tggttcttacataacgaagaaattaaaaatcacatcgagacaaactgcgaatacttttcgattatgttgttaaatctttacaaagccacagatcttgcttttcaagatgaatttgagcttaatgaagcaagaaatttttcaagaaaactacttgagaaatgtatttcaatggaagaaaatggagatcacatatttcataatctgattgagcatgaattaagtcttccatggatggcccgattggaccacctcgaacataggttttggatagaagaaactaaaaaccatgttctatggcttggaaagaatcattttcgaaggttgttaagcattcataatgacaaattaattcgtctagccatcttaaattaccacttcaaacaatctatcttcaaggctgaactcgaacacttaacaaggtggtgtaaagattggggacttagtgaaatgggatttggtagagaaaaaagtatgtattgttatttcgcaatagcttcaacttgtagttctttgccttatgattctccaattcgattggcggttgcaaaaggtgctataataataacggtgacagatgatttttttgatatgaaagactccttaatcaccgagttagaaaactttactaaggcaattcaaaggtgggatggtgaaggattgagtggtgttagtaagaaaatatttgatgccctagataattttgtaaaggaaatggcaattatgtaccttgatcaacaagaaacaagtgacatcacaaatttcttaagagaaatatggtatgaaacaattgtttcatggcttactgaatctaaatggagtaaaagtgggattataccaaccatggatgaatattttaaagttggaatgacttctatagcaactcacaccttgcttcttccagcttcatattttctaaagccaagcttaaaaatatcccaattacaatcaacggagtatgccatcgttactaaattggttatgattatttgtcgtttgttgaatgacatacaaagttatgagaaagaaaaaaatgagggcaaaccaaactcaattacagtgtacttgaagaacaatcccgaggtagagatcgaagaagcaatcgagtacgtgcaagagatactaaataaaaagaagaaagaattacttgagcatgttttgattgacaacgacgacgatgatgatgttagggttttgcacctctcttgcttaaaagtatttcaaatgttcttcaactcttcgaatcgatttgattcagaggttgaattgcttgatgatattggcaaagcgatctatattcctttgaagttagatggattagcatctaataaa

SEQ ID NO: 1375 - DNA, 1515 bp, synthetic construct
  misc_feature 1..1515: note = Description of Artificial Sequence: Synthetic polynucleotide
  source 1..1515: mol_type = other DNA
gatttagataaatacagggacgttttaagaaaagcagacccatttgatgaaggtctgaagatgattgatgctattcaacggctaggaattgactatatcttcgaggaagagattgataaaattatacaaagccagtctgcttataagttttttagagaattcgagcatgatcatcatcatcatcaagatctgtatgatgtagctcttcgttttcgactcttgagacaacacggtcacttcgttcctgctgatattttcaacaagtacaaggacaataataagggttgtttcgacacaaggctaagagaggacatcaagggtttgctgagcttatatgaagcctcccatctatgcatagagggagaaaatatccttgatgaagctgctttatttagtgctcaacacttggaagcgtccatgacacgtcttcatcgttatgatcaatatcaggccaaatatgtggcaactacacttcaaaatcccactcacaaaagtttatccaagttcacagccaaggacctttttggtgtctatcccagtcagaatgggtacataaatttgtttcaacaactagcaaaagttgaatttaatagagttcagtccctgcatagaatggaaattgataaagtcaccagatggtggcgagacattggtttagctaaggaattaactttcgcaagagatcaaccggtgaagtggtatatttggtccatggcctgcctaaccgatccaatcttgtcgaaacaaagggttgcgcttacaaaatccatttcgtttatctatgtaatagatgatattttcgacatgtacagttcacttgatgaactcattctcttcacccaggctgtctctagctgggaatatagtgctatagaaaaacttccagactccatgaagacatgctttaaagccctagataatatgatcaatgagtctagccatacgatctatcaaaagcgtggatggagccctttacactctcttcggaagacgtgggcaagtttgtgcgaagcctttttagtagaggcaaaatggtttgcatcaaggcacgtaccaaaggcaaaagaatacttggaaaatggtgtggtcagctcaggagtgcacgtagttctggttcatatatttgttctcttggatgaaaccagtctcacccaaaagacactggattttgtggaaaacatgccttccatcattacttctacagcatcgattcttaggctttgggatgactttggtagtgccaaggatgagaatcaagaaggacatgacggatcttatgtggagtgttacatgaaggaattaggaggcagtgttgaagatgcacgtgaggaaatgatggaaaagatttcagatgcatggaagtgcctcaacaaagaatgcatacttcgaaatccagcgtttccaccaccattcctcaaagcttctctcaatctcgcaagattagttcctttgatgtataattatgatcacaaccaacgcctaccccacttggaagaacatatcaaatctttgtta

SEQ ID NO: 1376 - DNA, 1683 bp, synthetic construct
  misc_feature 1..1683: note = Description of Artificial Sequence: Synthetic polynucleotide
  source 1..1683: mol_type = other DNA
atgttcacacaaatcttagtatcattatcttcaaatgacaacccaaatataattgttcgtcctacaaaaaaattccacccaaatatttggggagaacgattcttacattacaacatttcacaacaagatttgtattgtcaacaacaaaaggttgaggaattaaaagaagtggttagaagagaaatatttggagattattattatgatgcttggaaaaatcaattgaagataattgatgtggtagaacgtttgggattgtcttatcattttgaaactgaaatagaaaataagcttcaatgcatttacaacaaaaccaatattgatgatgaagatttacaccatgtttctattcgatttagacttctacggcaacatggatttagaatttcttctgcagatatatttgaaaaattcaaagatgaggatgggaactttaaaaaatgcttggtaagtgatacccttggtttgcttagcttatatgaagcctcacatttgagctgtgttggagaaaatatacttgatgaagcacttgctttcacaacaacacacctaaatgagtttttggcgaagaaaaaagaacaccatgaagacgatgatccattatcgaaagaaatatctcgagccctagagaggcccttaagaaagaccctagtaaatcttcatgcaaggcatttcatttcgatatatgaaaaagatgcctcacataacaaagtattgttacaacttgcaaaattagattttaatctattacaatgcatgcacaaaaaggagcttagtgaagtcagcaggtggtggaaagaatcagattttgtacacaaatttccatttgcaagagataggattgtggaattgtacctttggatattaggagtttattatgaaccccaatactgtttggcaagaaatattctagtcaaaatcatagctttggcctcaattgctgatgatatttatgatgcatatggtacacttgaagaacttgagttcctaactcatgcaattgaaaggtgggatataaattgtgtagataaactgaatcaggaatatatgcaaacattttataaagatgttttgaattgttatgaagagtttgagcaactgctagaaaaagaagaaacatacagagttcattatgcaaaagaagcgtttaagggattagttcaatctcatttgaatgaagctcgatgtttgcatagaggatacatcccaagttttgaagagtacttgaaatttgctttgggtaattgtggttactacatgttgatactaagctctttggttggaatgaaaactaatattgtaacaaaagaagtttttgagtggctctcgaaagatcgaaagattattagagcatctgttactatttgtaggctaatggatgacatagccgaacacaagtttgaggaagatgattatgaggaacattcagcagtggaatgctatatgattgaacatggcgtttgtgaagaggaagcctatgatgaactgaataagctaataatgaatgcatggaaagaaataaatgaagagtttttgaagcctactaaagtagcttcacctatattacttcgtgctcttaacttttcaagggttatggatcttattttcaaatttggagatggttatacacacgttggaaaaatcaccaaagatattgttgctgctttgcttattcatccaatt

SEQ ID NO: 1377 - DNA, 1320 bp, synthetic construct
  misc_feature 1..1320: note = Description of Artificial Sequence: Synthetic polynucleotide
  source 1..1320: mol_type = other DNA
tggttcctaaagaatgaggaaataaaaaactacatagaattcaactctgaatacttttttgttgcaatgctaaatctttacagagctactgatcttgcttttcatggtgaatttgagcttgatgaactaagaacattttcaagaaaattacttgagaaatctatttcagaaggagctcaacatacaaatccctttaagaaactgattgagcatgagttaagtcttccatggatggctcgactagatcacctcgaacataggttttttatcgaacaaactaataaagctttatggatgggaaagacatcttcacaaaggttatcaaagttttacaatgataaattaattcgtctagccactttaaactacgagttcaaacagtatatttacaagactgaacttgaacagttaacaaggtggtctaaagaatggggacttagtgaaatgggatttggtagagaaaaaagtacatacaattattttgcagtagcttgtgcttgctgttatttgccttatgattctccaattcgattgatgattacaaagggtgctataatagtaacggttgctgatgatttttttgatatgaaaggctctctattcactgatttaaaattcttcactaaggcaattcaaaggtggaataatgaagggttgagtggtgttagtaaaaagatatttgatgccctagataatcttgtaagggaaatgtcaactatgtaccttgaacaacaagaaaaaagtcatgaagacataaccagctacataagaaaaatttggtatgaaacgatttgttcatggcttactgaatctgagtggagtaaaagtggaattgtaccaaccatggaagaatattttaaagtttcaatgacttctgtagcaactcataccttgcttcttccagcttcatttcttctgaaaccgaccttaaaaaaatctcagttacaattaatggagtataaaagtgttactaaattggtcatgattatttgtcgtttgttgaatgacttacaaagttctgagagggaaagagaagaaggcaaaccaaactcaatcacagtttacatgaagaataattttgagatagagaataaggaagaagtagtaaagtacttgaaagagatattaaacgataagaagaaggagttccttgagcatgttttgattaatgacaatggttttaccaatcttcctaaagagtgtaggcttctacacttatcttgcttaaaagtattccaaatgttctttaactcttcaaatcgatatgattcagacactgaattgcttgaagacattaacaaagcgatttacattcctttg

SEQ ID NO: 1378 - DNA, 1590 bp, synthetic construct
  misc_feature 1..1590: note = Description of Artificial Sequence: Synthetic polynucleotide
  source 1..1590: mol_type = other DNA
aataacaaagagagttatgtgaagattattgagctgaaggaacaagtgaagaagaaattacttcatggtcttcatcctttggaaaatcctttagagacacttgaatatattgatgatattcaacgattggggttatcttattattttgaaaatgaaattgaacaagttttgaagcaatttcataataataataacaatcttcatcatgattttggtgataataacctttatgctgatgctcttcgatttcggttgcttagggaacaaggttataatattgcatgtgaggtatttgccaaatataagaatgagaaaggaaaatttaaggaatcaatttcgagtgacattcgaggaatgttgaacttgtatgaagcttcacaaatgagagttcgcagagaagaaatactagatgaagctcttatcttcacaactactcatcttcaatccttagtggaaacatcccaattgagctctccttatctagacctagtgaaacatgccctaatgcaccctatccgaaagagctttcaaagaagagaggcaagactttacatatcactttaccatcaactaccttctcacgaagagcttcttttaaccctcgccaaactagatttcaacttgcttcaacaactacatcaaaaggaattgaattatattacgaggtggtggaaggagtttgacttcaaaagtaagcaatctttttcaagagacagaatagtggagtgttacatttggaattatggagtatattttgaagctcaaacttcccaaattaggttgatgatgaccaagttgatttctttgcttactattattgatgattcttatgatagctatggtacacttgaagagctaaggccttttactgaagcatatatatatttacttaataaatatgatatgattatcaggtgggatatatctgctactgacaacttgccagagtacatgaaagtatgttacaaaaaatgtttagaatttttcaatgaaattgaagaatttacaaaggaaaattcatactgcgcgagttatattaagaaagggttgcaatgtatggttagagcttatagtaaggaagtccaatggttacacaataaatatatgccaacatttgatgaatattatccaattggacttgataatgctggatctgaagagctaatatcaatggccttttgtggaatgggagatgttgtaacaaaagaatctatggattggatattttctcaaccccaacctaagattatacgaactatgtcaattgttggaagacttatgaatgacattggctaccacaagtcggatcgaagaaaattatcaaaagatgtagtggcttctgctgtggagtgttacatcaaacaatatggtgtaacagatgaagaagctatagagaaacttaacgaacaagttaatgattcatggaaggatctcaatgaagatcttctctatccaatcgctattcctagaccactcttaatgagagttctcaatcttgtacgagtgaaccatgagatgtacagagaaggtgacggttttacacaaccaacattgctcaagaatttgattgatactctcatcatcaatccc

SEQ ID NO: 1379 - DNA, 1605 bp, synthetic construct
  misc_feature 1..1605: note = Description of Artificial Sequence: Synthetic polynucleotide
  source 1..1605: mol_type = other DNA
aatgttgttgttcgaccaacaacaaaatttcacccttctatttggggagatcgattcctccattacaatgtatcacaacaacacttggaatgcaaagaagaacgagtgaaggaattagttgaagttgtaaggaaagagataatgatatcattattatcatcattgaagttaattgatagtgttcaacgtttgggattatcacaccattttgagactcaaatagaacaaatgttggaaaaacatgatctaaactactacaaacatgatctacatcatgattctattatgtttagactattaagacaacatgggtttaaggtttcatcaagcatatttgagaaattcaaagacgagaaaggtaattttaagaaaagcttgataaccgatgtttcgggtttgcttagtttgtatgaggcttcctacttgagttatgttggagaaagcatactagatgaagcacttgctttcacaaccactcaccttaaggctattgtggcaaatagtaaagatcatccattatcacatcaaatatccaaagcattggaaaggccattaagaaagaccatagagaggcttcatgctaggttttatatctcaatctatgaaaaggatgcctctcataacaaagtattgctagaacttgcaaagttagatttcaatctacttcaatgtttccacaaaatggagcttagtgaaattatgaggtggtggaaaaagcatgactttgcaaacaaattcccttttgcaagagataggatggtggaactatatttttggatgttgggtatatattatgaacccaaatactctcgagcaagaaagctaacaaccaaaatctctgctttgatttcaatcacagatgatatatatgatgcatatggtacaattgatgagcttgagcttcttacccaagccatgcaaaggtgggacataaattttatagataaacttgagccagaatatttgaagacatattataaagcaatgttgacttcttatgaagaatttgaaaaagagtttacaaaggaagaattatacaaacatcaatatgcaaaagaagagatgaaaaaattgattcgagcttatttagaagaagctcgatggttgaacgatggatacttgccaagcttcgatgagcatttgagagtttcttatgtttcttgtgcttacacaacgttaatcgccacaagttatgtaggaatgtatgatattgtaacacatgaaactctaaattggctctccaaagaccctaaaattgtttcagcttccactctacttgctaggttcatggatgatattggttctcgcaagtttgagcaagagagaaatcacataccatctacagtggaatgttacatgaagcaatatggggtatcagaaaaagaggcaattgaagaactgaataaaagagtggtcaattattggaaagaaattaatgaagacttcattaggccaactgttatgcctttccctatcttagttcgtgttcttaatgttacaaaagtattggatcttctttacaaaaatggtgatgatcaatatacacatgttggaaaattgtttaaagaaagcattgctgctttacttatagatccaatccctgta

SEQ ID NO: 1380 - DNA, 1917 bp, synthetic construct
  misc_feature 1..1917: note = Description of Artificial Sequence: Synthetic polynucleotide
  source 1..1917: mol_type = other DNA
atggctgcattagtgtccactgtaagtagtattattaggtggaatagtaataataataataataataacttcactagatctgtgaaatcatgtttaagttcaaattaccataataataataatattattcataataaaactgtattaatgtccaccaataataataataataataatcagaagaatagttctcgaagatcagcaaactatcaacccccactttggcaatttgattatgtacaatcactttcttctcctttcaaggaaggagcatatgccaaaagagttgagaaagtaaaggaagaggtaagagtaatggtgaagagagcaaaagaggaggagaagcctttatctcaacttgagctaattgatgtaatgcaaagacttggaatctcttaccactttgagaatgaaattaatgacatattgaaagatatatataacaacaataatgtgtgcaacaccaacaataatgtgtatgccaattctcttgaatttagactcctaagacaacatggttatccggtgtctcaagaaatatttagtacgtgcaaagatgaaagaggcaattttatggtgtcttccaatgatatcaaaggaatgttatctttatatgaagcttcattctatttggtagaaaatgaagatggtattttggaagagacaagacacacaacaaagaaatatcttgaggaatacataatcatgatcatggaaaaacaacaatcattattagatcaaaataataataataatgataatgattatgattatgaactagtgagccatgcattggagcttccacttcattggagaatgttaagattggagagtaggtggtttattgatgtgtatgagaagagactagacatgaaccctactctacttatgttagctaaactagatttcaacattgtccaatcaatataccaagatgatcttaaacatgtcttcagctggtgggaaagcactggtatgggaaagaagttggaatttgcaagagatagaacaatggtgaatttcttatggacagtaggagttgcatttgagccacatttcaaaagttttagaagaatgattacaaaagtaaatgctttaattacagtaatagatgacatatatgatgtttatggtacactagatgaattggagctcttcactaatgcagttgagagatgggatattagtgctatggatgggctccctgagtatatgaagacatgtttctttgctttatacaatttcataaatgatcttccatttgatgtgttaaaaggggaagaaggcctccatataataaaagtccttcagaaatcgtgggcagatctttgcaaatcttatttaagagaagcaagatggtattatgatggatacacaccaagatttgaagagtacattgagaatgcatggatatcaatatcaggacatgttatactatcacatttatacttttttgtagtgaatccaaacaaggaagatgccttattaagtacttgctttgatggataccctaccataatacgacattcatcgatgattttacgtcttacagatgatcttgcaacttcaacggatgaactgaaaagaggcgatgtttctaaatcagtccaatgcaaaatgcatgaagatggcgtgtctgaagaagaagctcgtcaacatattaagttattaataagtgaaacatggaaacttattaataaagattacataaatttggatgatgatcatgatggtgatgactactctccaatgttctataagtctaataatactaataaggctttcattgaaatgtgtttaaaccttggtagaatggcacattgcatttatcaatatggagatggacatggaattcaagatcgccaaacaaaagatcatgtactatcattacttatttaccctattcctcttacccaa

SEQ ID NO: 1381 - DNA, 2361 bp, synthetic construct
  misc_feature 1..2361: note = Description of Artificial Sequence: Synthetic polynucleotide
  source 1..2361: mol_type = other DNA
atgtctcattcattgcattccaacattaggtgctcctcctcttcttcctcatcagcttctcccataccaagactaaatggtgcaaggaaaagcaacatagctgttttgaagtttgaggagaccaaagagagaataaagaagatgttcaataatgttgaactctctgtctcgtcttatgacactgcctgggtggcaatgatcccttcaaattctgggcatcaccctttctttcctcaatgtgtaaattggttactagagaatcagcactctgacggttcatggggtcttcctcatcgtcatcccttgcttatgaaagatgctcttttatctactttaactagtgtacttgcaatgaagcgatggggtgttggcgaagaacaaatagacaagggcttgtctttcatagaggaaaatatagcttcagccattgatgagaagcaatgttcacctattggatttgaagtaatatttcctacaatgattgattatgcgaaaaaatcagatctgaatattactcttgagccatccaattataatgacctaattcataacagaaaggtttcacttgaaagagcctcaggaagctactcagagggtcatgaagcatacttagtgtacatttcagaaggtcttggaaagccactggattgtgaaagagtcttcaagtaccaaaggaaaaatggttctctgtttaattctccatccaccacagctgttgcttttacaaaccatgggaatgctgactgtcttaagtatctctgctctgttgtagacaagtttggaagtgcagttccaacagtatatcctctagatatttatgctcgtctctcaatggtggacaatctccaaaggttggggatagaacgatttttcaaagaggaaatcagaagtgtactggatgaaacatacaaatattggctgcaaggagaggagtgtgttctcttagatgcttccacctgtgcaatggcatttcgtttattgcgtgttaatggatatgatgtatcttcagatccattaattcgattttcagaagattatatatacaattaccttgggaatcataccaaggatatagatgctatcttggaaatatttagagcatccgagatcatcatacacccaaatgaatcaatcttggagaagcaaaatttctgtacaagtcattttctagaacaagagttatacagcatttcaactaggggagataaactcaataaaaatattggcaaagtggtaagtgaagctcttaagattcctttctatgcaaacttggaacgactagcaagtagaagagccatagagtactatgacactgatagtacgaggattctgaaaacttcatattgttcctcaaatgttcggagcaaggatttcctaatattagcagttgaagacttcaacatgtgccaatcaatacaccgtgaagaactcaaaattctttctaggtgggttgtagagaataggttggacaagctaaagtttgctaggcagaagctggcatactgttacttttctgctgctgctactctttcttctcctgaattatctgatgcccgcatatcatgggcgaaaaatggggtacttactacagtggttgatgatttttttgatattggaggttcagaagaggaactagtaaacctcattcaattgttggaaaagtgggatgtagatgtcagtgttgattgtttgtcggagcaagttgaaattatttatttagcacttcatggcacaatctctgaaattggagaaaaggcgttcgtgtggcaaggacgtagtgtgacaaatcacataatagagatttggctggatttgctcaagtctatgttgaaggaagctcaatggttgaaatacgagaccgtcccaacaatagatgagtatatgaaaaatggatacatatcatttgccttaggacctatagtccttccagcactttacttagttggacctatgctttctgaggatgttacaagacatcctgagctccattatctatataaactcatgagcacttccggacgacttctcaacgatatccacggcttcaagagagaatccaaagaagggaaactgaatatagtgtcactaagcctactggcgcgtggttttggctctggttcttcttctgaagaagagatcattaatgaaatgaaaagtgctgtaaatggtaagaggagagaattgctgaggctagtttttaaggaaaaagatagcattgttccaagagcttgcaaggacttgttctggaaaatgagccaagtgttgcacctattttatgccaatgacgacggattcacctcaaatgagatgatcaatgtcgcaaaagcaataattgaggagcccataattgaaaataaattg

SEQ ID NO: 1382 - DNA, 1701 bp, synthetic construct
  misc_feature 1..1701: note = Description of Artificial Sequence: Synthetic polynucleotide
  source 1..1701: mol_type = other DNA
atgtcgtctcaaatcttagcaacctcatccaaaaatgacaatatacataaaattgttcggccaacaacaaattatcatccttctatttggggagaccgatttttgcattacgatattccaaaagaagaattggtgtataaacaaggcgaagttgaagaattgaaagaagtggtaagaaaggagatatttggagaattcttatgtgatgattggagtaatcgattgaagttaattgatgtggtgcaacgtttgggattgtcctatcattttgagagtgaaatacaaaatgagcttcaacacatttacaacaaaataagcattaatgattctaatttcgaacatgaaactttgcatgatgcttctattcggtttagacttctacgacaacatggatatagggtttctttagatatatttgacaagttcaaagatgagaatggcaactttaaagaatgtttggcgagtgacaccgttggtttgcttagcttatatgaggcctcacatttgagctgtgttggagaaaatttactagatgaagccctttctttcactaccaaacacctaactgaatttttggaaaataataaaaaagaacaccccaatgatgatccattatcaaaggaaatatctcgagccctagagaggcccttaagaaagaccctagtgaatctccatgcaaggtatttcatttcaatatatgaaaaagatgcctcacataacaaagtattgctacaacttgcaaagttagatttcaatctattacaatccatgcacaaaaaggagcttagtgaaatctcaaggtggtggaaggaattagacagtgcacacaactttccatttgcaagaaataggattgtggaactatatatttggatattaggagtctattatgaaccccaatactcttttgcaagaaatattttagtgaagatcatagcactttcctcaatcgctgatgatatttatgattcatatggtatatttgaagaacataagctccttattgaagcaattgataggtgggacaaaaattgtatggataaactccatccagaatacttgcagaaatattataagatacttttgcaatcttttgaggaatttgaacaagagtttgaaaaggaggaaacttacaaagtttactatggaaaagaaacgtttaaaagattattaagaggttattttgaggaagctcgatggttgaatgaaggatacatgccaagtttggaggagcatttaaaagtttctttggttacttctggttatttcatgttgatggcttgctctttagttggaatgaaaagtaacaatattgtaaccaaacaagttttcgagtggctctccaaagaccccaagattgttagggcaagcgctagtgtttgtaggtacatggatgacgtggctggtcacaagaatgagcaagagagaaatcatataccatctacaatagaatgttacatgaagcaatatggtgtatcagaagaagaagcatgtgatgaaatgaataggcgagtggttattgcatggaaagaaataaacgaagagtttctcaaaccaactgaagcagcttcacctatattagttcgtgctctgaatcttgctagggttatggatcttctctacaaaaatggtgataactatacacaagttggaaaagtcactaaagatagtgttgctgtcttgctcattgatccaattcca

SEQ ID NO: 1383 - DNA, 1587 bp, synthetic construct
  misc_feature 1..1587: note = Description of Artificial Sequence: Synthetic polynucleotide
  source 1..1587: mol_type = other DNA
aataacaaagagagttatgagaagattattgagatgaaggaacaagtgaagaataaattacttcatggtcttcatcctttggaaaaccctttggagacacttgaatatattgatgatattcaacgattggggttgtcttattattttgaaaatgaaattgaacaaaatttggagcaatttcataataattatcaaaatctaattgattttggtgataataacctttatgctgatgctctttgctttcggttgcttaggcaacaaggttataatattgcatgtgacatattcgacaagtacaagaatgaaaaaggaaaatttaaagaatcaatttcgagtgacattcgaggaatgttgaacttgtatgaagctgcacaaatgagagttcatggagagaaaatactagacgaagcacttatctttacaactactcatcttgaatcctcagttaaaacatgtcaattgagctctccttatctagacctagtgaaacatgccctaatgcaccctattcgaaagagcttacaaagaagagaggcaagactttacatatcactttatcatcaactaccttctcatgaggagattcttttaacacttgctaaattagatttcaacttgcttcaaaaactacatcaaaaggaactaagttacataacgaggtggtggaaggagtttgattacaaaagtaagcattcatttataaaagacagaatagtggagtgctatttctgggtttatggagtgttttttgaggcagaaacttcccaaatcagactaataatcaccaaattaattgctattctcacaataattgatgatgcttatgatagctttggtacacttgaagaactagagccttttactcaagcaatagaaaggtatactttataatatatatatatgattaggtgggatatatgtgccatggatactctgcctgagtacatgaaaatattttacatgaaacttttggagatctacaatgaaattgaacaattttctaaggaaagatcatactgccctagctatgctaagaaaggggtgcaatctctaattagagcttattttaaggaagccaaatggttacacacaaaatatataccaacattagatgaatatatgccagttggggttgatagtgcaggatcttttatgctcatttcaatggtttttattggaatgggagatattgttacaaaacattctatggattggatattttctaatcctcaacctaaaattatacaaactatggcaatagttggaagagttatgaatgacattggctaccataagtcggagcggaagaaatcatcaggagaaattgtggcttcaactgtggagtgttacatgaaacaatatggcgtgactggtgaagaagctatagagaaacttagcgaacaagttaaagattcatggaaagatctcaatgaagatcttctcaatccaatcactatccctaggccactcttaatgcaagttctaaagcttgtacgagtgaaccatgagatttatagagaaggagatggctttacacaacccactttgctcaagaatttgattcattctctcatcatcaatcca

SEQ ID NO: 1384 - DNA, 1695 bp, synthetic construct
  misc_feature 1..1695: note = Description of Artificial Sequence: Synthetic polynucleotide
  source 1..1695: mol_type = other DNA
atgtccactcaaatcttagcatcatcatcatcttcaaatgaaaacccaaataaaattgttcgtcctacaaaaacatttcatccacatatttggggagaacaattcttacattacaacatttcagaacaagatttgtattgtcaacaagaaaaggttgaggaattaaaagaagtggttagaagagaaatatttggagaatcatcaatatcatcatcagcttattatgatggttggaaaaatcaattgaagataattgatgtggtagaacgtttggcattgtcttatcattttgaaactgaaataggaaatatgatagaacaaatctacaacaaaaccaatattaatgatgaagatttacatcatgtttctgatcggtttagacttctacgacaacatggatttagaatttcttcggatatatttgaaaaattcaaagacgaggatggcaactttaaaaaatgtttggcaagtgatacccttggtttgcttagcttatatgaggcctcacatttgagttgtgttggagaaaatatacttgatgaagcacttgctttcacaacaacacacctaactgagtttttagcaaagaaaaaagaacaccatgatgacgatgatccattatcgaaagaaatatctcgagccctagagaggcccttaagaaagaccctgaatcttcatgcaaggcatttcatttcgatatatgaaaaagatgattcacataacaaagtattgttacaacttgcaaaattagatttcaatctattacaatgcatgcacaaaaaggagcttagtgaagtcagcaggtggtggaaagaatcagattttgtacacaaatttccatttgcaagagataggattgtggaattgtacctttggatattaggagtttattatgaaccccaatactgtttggcaagaaatattttaatcaaaatcatagctttggcctcaattactgattatgatgcatatggtacacttgaagaacttgagctcctaactcatgcaattgaaaggtgggatataaactgtgtggatacactcaatcaagaatacatgcaaacattttataaggacgttttgaattgttatgaagagtttgagcaagtgctagaaaaagaagtaacataaagagttcattatgcaaaagaagcgattaagggattagtccgatctcatttggatgaagctcgatgtttgcatagaggactcatcccatgttttgaagagtacttgaaatttgctttggataattgtgcttactacatgttgatactaagctctttggttggaatgaaaactaatattgtaacaaaagatgtttttgagtggctctccaaagatcgaaagattattagagcatctgttactatttgtaggctcatggatgacatagctgaacacaagtttgaggaagatgattatgaggaacattcagcagttgaatgctatatgattgaacatggtgtttgtgaagaagaagcctatgatgaactgaataagctaataattaatgcatggaaagaaataaatgaagagtttgtgaagccaactcaagtagcttcacctatattatttcgtgctcttaatttttctagggttatggatcttattttcaaatttggagatggttatacacacgttggaaaaatcactaaagatattgttgctgctttgcttattcatccaattcca

SEQ ID NO: 1385 - DNA, 1461 bp, synthetic construct
  misc_feature 1..1461: note = Description of Artificial Sequence: Synthetic polynucleotide
  source 1..1461: mol_type = other DNA
caagagttgaagcaagttacgagtacttcacttagaaccacaaaagacccttgtattctcttgaagcttattgattctatccaaaggttgggactcgaatatcacttcgaaaatgagattgaagaagctgtttctttcatttacgcacataatgatcaaactactagtaatgatctcttcatgacagcacttagatttcgtattcttaggcaacatggcttatttgttggctcagatgtgtttgacagatttagaggcagagatgggaaattcttggacagcttaagcagtaacaagcatggaattttgagtttgtatgaagcttcacaccttggaatggctgaagaaaatgttttggaggaagccaagagtttcaccaccaaaaggctaagatatttctcagctgggaaaatggataatactttgtttggtaagcaagtgaaacaatcactggaagttccactgtattggaggatgccaagatctgaagctaggaatttcattgatctctaccaaatggatgagacaaagagtgtgactttgcttgagttggctaagttggattataatctggtccaatctgtgcatcaaaatgagcttaaggagttgggaaggtggtgggaaaatttgggattcaagaaaaatctaccttttgcaagagatcgtgtggtggagaactatttgtgggccatgggaatcgtatctgagccacagttctccaaatgcaggataggcttaaccaagttcgtttgcatattaacagcaatagatgatgtttatgacatatatggatcattagatgagcttgaacttttcacaaatgcagtagaaagctgggacataagggcaataagggatgaatttcctctttatttgaaaacatgctatcttggcatgcttaattttggtaatgaagtgatcgatgatgttcttcaaaaccatggcttgaatatttcctcctacattaaagaagagtggttaaatctctgcaaatcatatcttgtagaagcaaggtggttttataatgattatacaccaagtttgaatgaatacttggaaaattcatctacttcagttggtggtcatgcagctatagttcatgcttgtattttactcttagatggctccatacccgaaaccttactggattacaatttcaaccattttcactctaagctgatttattggtcatctcttataacaaggcttagtgatgatttaggaacttcaaaggatgagcttaaaagaggagatgtgaagaaatcagtggagtgctacatggcagagaaaggaatatgggaagaagaagaagcaataaatcacataaaagaattgagaagaaattcatggaaaatggtgaacaaggagataataattgggaataattgcctgccaaaaataatggtgaagatgtgcttgaacatggcaagaactgctcaattcatattccaacatggtgat

SEQ ID NO: 1386 - DNA, 1692 bp, synthetic construct
  misc_feature 1..1692: note = Description of Artificial Sequence: Synthetic polynucleotide
  source 1..1692: mol_type = other DNA
agtactccaatattcaaagatcaaccagcagcaatcgtccgccgatcaggaaactacaaacccacattgtgggatgctcattttttccaatcactccaagtcatatatacggaggaaagctatgggaaaagaatcaatgagctgaaagaagatgtgagaagacttcttgagaaggagagtgaaaatcctttagttaagcttgaacacatcaatgatttgagcagacttggaatatcttatcactttgaagatcaaattaagacaatattaaacctgacatttaacaataataatgcattgtggaagaaagataatttgtatgccactgctcttcatttcaaactccttcgacaatatggatttagtcatgtatcttcagagattttcaatgccttcaaaaacgagcaaaaggagttcaaagagagtttgagtaaggatgtgaaaggaatggtatgtctatatgaggcttcattctattcatttagaggtgaacccatattagatgaagcaagagacttcacaaccaaacatctcaaacaatacttgatgacaaggcaaagtcaatttactagagttgaccatcatgatgatgatgatcatgatcttgtgaaattggtaaagcatgccttggatcttccactccattggagattgccaagattggaggctaggtggtttattgatatgtatgctgaaaggaattatgatatgaatccaacttttcttgactttgctaaacttgactataacttcgttcagtcagcatatcaaaaagagctcaaatatatttcaaggtggtggagtggttctagattgacagaaaggctaccatttgctgacagagtagtggaaattttctattctgcagtggcattgaaatatgaggcggaatttggatttgttagaactgtgatgacaaaaattggtctcttgctaacactcatggacgatatatatgatgtgtatggtacactagatgagcttcagctttttctagaggcaattgagaggtggaatataaatgaactggatcagctacccgattacatgaagatattgtttgttgctttttataacaatgtgaatgagatatcttattatgtcctcaaagaaaatgggattcacaccatcaaatatctgaagaaggcgttgggggatctgtgtaaatgctatatggaggaggcaaaatggtttcacagtggacacataccaagtttagaagaattcattgagaatggatggaattcaattacaatacctctttgtcttatttatcattattgcttaattacaacttcaattacagaacaagacatggaacacttgcttcaatatccaaccattttacgtgtctcaggaactgtttttcgatttatagatgatttgggaacctcatcagatgaacttgaaagaggagataatccttcatcaattcaatgctacatgcgtgaaaagggtgttagtgaaaatgaaagccgtgaacacatatggaatttaattagtgaaggatggaaggaaattaatgaagttaaagcttcaaactctccatactctcaagtgtttattgaatctaccattgattttgttagaggagcaatggagatgtatcacaagggtgatggttttggtactaatcaagaccgatatcttaagaacaaagttgtcaacatgttcttcgatccaattccaatt

SEQ ID NO: 1387 - DNA, 1584 bp, synthetic construct
  misc_feature 1..1584: note = Description of Artificial Sequence: Synthetic polynucleotide
  source 1..1584: mol_type = other DNA
aataacaaagagagttatgtgaagattattgagctgaaggaacaagtgaagaataaattacttcatggtcttcatcctttggaaaaccctttagagacacttgaatatattgatgatattcaacgattggggttatcttattatttcgaaaatgaaattgaacaagttttgaagcaatttcataataataacaatcttcatcacgattttggtgataacctttatgctgatgctcttcgctttcggttgcttagggaacaaggttataatagtgcatgtgaggtattcgccaaatataagaatgagaaaggaaaatttaaggaatcaattttgagtgacattcgaggaatgttgaacttgtatgaagcttcacaaatgagagtatgcggagaaaaaatactagatgaagcacttatcttcacaactactcatcttcagtccttagtggaaacatcccaattgagctctccttatttagacctagtgaaacatgccctaatgcaccctattcgaaagagcctacaaagaagagaggcaagactttacatatcacgttaccaccaactaccttctcacgaaaagcttcttttaactgccaaactagatttcaacttgcttcaacaactacatcaaaaggaattgaattatattacgaggtggtggaaggagtttgacttcaaaagtaagcaatctttttcaagagacagaatagtggagtgttacatttggaattatggagtatattttgaagctcaaacttcccaaattaggttgatgatgaccaagttgatttctttgcttactattattgatgattcttatgatagctatggtacacttgaagagctaaggccttttactgaagcatggatcatatatatataattatacttttattttgtcatatcattaatttttttttccacacatataataaaatatttaatatttattaaaaaaattcttttaattttatttttttaatttaaaaaagcaactaaatagttactttttcaaaactcccaaaaagcgaaaatttctagaaacgagatttttctagtttttttccattttcagtaattgttttgaatttcggagtgtatgctgacgtgacacaacgatatttgtataaataattttcttaaaagtatttttataaataaaatcacttttaagtataatattaaaaaaaaaaccctaatatatattgagtattgctataagaaatattatagtgtcatatattgaaaacatgtcatatattattattatagtgcaaataaattgcaagttcatccccataatcaaaaattatcaaaagatgtagtggcttctgctgtggagtgttacatcaaacaatatggtgtaacagatgaagaagctatagagaaacttaacgaacaagttaatgattcatggaaggatctcaatgaagatcttctctatccaatcgctattcctagaccactcttaatgagagttctcaatcttgtacgagtgaaccatgagatgtacagagaaggtgacggttttacacaaccaacattgctcaagaatttgattgatactctcatcatcaatccc

SEQ ID NO: 1388 - DNA, 1905 bp, synthetic construct
  misc_feature 1..1905: note = Description of Artificial Sequence: Synthetic polynucleotide
  source 1..1905: mol_type = other DNA
tctataatggctgcaatattaagtagtattattagcttgaatagtaataataataataataccttcactagatgtgtgaaatcatgtttaagttcaaaccataataattataatattattcataataaaactgtaataatgtccaccaataataataataatattaataatattatttctcgaagatcagcaaactatcaaccttcactttggcattttgattatgtacaatcactttctacccctttcaaggaaggagcatatgccaaaagagttgagaaagtaaaagaagaggtaagagtaatggtgaagagagcaaaagaggaggagaagcctttatctcaacttgagctaattgatgtaatgcaaagacttggaatctcttaccactttgagaatgaaattaatgacatattgaaagatatatataacaacaataatgtgtgcaacaccaacaaaaatgtctatgccaattctcttgaatttagactcctaagacaacatggttatccagtgtctcaagaaatttttagtacgtgcaaagatgaaagaggcaattttatggtgtcttccaatgatatcaaaggaatgttatctttatatgaagcttcattctatttggtagaaaatgaagatggcattttggaagagacaagacacacaacaaagaaatatcttgaggaatacataatcatgatcatggaaaaacaacaatcattattagatcaaaataataataattatgattatgataattttgattatgaactagtgagccatgcattggagcttccacttcattggagaatgttaagattggagagtaggtggtttattgatgtgtatgagaagagactagacatgaaccctactctacttaccttagctaaactagatttcaacattgtccaatcaatataccaagatgatcttaaacatgtcttcagctggtgggaaagcactgatatgggaaagaagttggaatttgcaagagatagaacaatggtgaatttcttatggactgtaggagttgcatttgagccacatttcaaaagttttagaagaatgattacaaaagtaaatgctttaattacagtaatagatgacatatatgatgtttatggtacactagatgaattggagctcttcactaatgcagttgagagatgggatattagtgctatggatgggctccctgagtatatgaagacatgttttcttgctttatacaatttcataaatgatcttccatttgatgtgttaaaaggagaagaaggcctccatataataaaattccttcagaaatcgtgggcagatctttgcaaatcttatttaagagaagcaagatggtattataatggatacacaccaagctttgaagagtacattgagaatgcatggatatcaatatcaggacctgttatactatcacatttatacttttttgtagtgaatccaatcaaggaagataccttattaagtacttgctttgatggataccctaccataatacgacattcatcgatgattttacgacttacagatgatctgggaacttcaacggatgaattgaaaagaggcgatgttcccaaatcaatccaatgcaaaatgtatgaagacggtatatctgaagaggaagctcgtcaacgtattaagttattaataagtgaaacatggaagcttattaataaagattacataaatttggatgatgatgatggtgatgactactctccaatgttctataagtctaataatattaataaggctttcattgaaatgtgtttaaaccttggtagaatggcacattgcatttatcaatatggagatggacatggaattcaagatcgccatacaaaagatcatgtactatcattacttattcaccctattcctcttacccaa

SEQ ID NO: 1389 - DNA, 1656 bp, synthetic construct
  misc_feature 1..1656: note = Description of Artificial Sequence: Synthetic polynucleotide
  source 1..1656: mol_type = other DNA
atgtcaaatattcaagtcttagcttcatttcaattaagtgacaaaattattgctcgtccaacaacaaattttcacccttctatttggggcgatcgattcctccattacaatgtttcagaacaagacttggtttgcaaacaagaaagaattgaagaattaatacaagttgtgaagaaagagatattatcttcaaatcatgatcaattgaagttgattgacaatctccaacgtttgggattatcacatcattttgagagtgaaattgagaaattgttggaacaattaagtatcggcactcatcatcaaaatcatcaagatctacatgatgcttctctttggtttagattattaagacaacatggatttaatgtttcatcaagtatatttgaaaaatttaaagacgatgaaggtaactttaagaaaagcttgataaccgatgtttcgggtttacttagcttgtatgaggcttcacacttgagttatgttggagaaagcatactagatgaagcacttgctttcacaaccactcacctcaaggctattgtggcaaatagtaaagatcatctattatcacatcaaatatccatagccttggaaaggcctctaagaaagaccatagagaggcttcatgctaggttttacatctcaatctatgaaaaggatgcctctcataacaaactattgctagagcttgcaaagttagacttcaatctacttcaatgtttccacaaaaaggaacttagtgaaattacgaggtggtggaaggagcatgagtttgcaaagaaattcccttttgcaagagataggattgtggaactgtatttttggatattgggtgtatattatgaacccaaatactctcgagcaagaaaacttctaaccaaagtcattgcattagcctcaatcacagatgatatttatgatgcatatggtactattgatgagcttcaacttcttaccaaagcaattcaaaggtgggacataaattgtctggataaacttgagccagaatatttaaagacatattataaggtaatgttggattcttatgaagaatttgaaaaggagcttaaaaaagaagaattatacaaacttgagtatgcaaaagaagagatgaaaagaattattggagcttattttgaagaagctcgatggttgagtgaaggatatttcccaagcttggatgagcatttgagagtttcatatgtttcttgtggttacgttttgttgatagccacaagttatgtaggaatgtatgatattgtaacacatgaaactctaaattggctctccaaagaccctaaaattgtttcagcttccactctacttgctaggttcatggatgatattggttctcgcaagtttgagcaaaagagaaatcacataccatctacagtagattgttacatgaaacaatatggggtatcagagaaagaggcaattaaagaacttaataaaagagtggacacccactggaaagaaattaatgaagactttattaggccaactgttgtgccttttcctatcttagttcgtgttcttaattttacaaaaatagttgatcttctttacaaagagggcgatgatcaatacacaaatgttggaaaagtgctcaaagaaagcattgctgctttgcttatagattcaatcccatta

SEQ ID NO: 1390 - DNA, 1698 bp, synthetic construct
  misc_feature 1..1698: note = Description of Artificial Sequence: Synthetic polynucleotide
  source 1..1698: mol_type = other DNA
atgtccactcaaatcttagcatcatcatcttcaaatgacaacccaaataaaattgttcgtcctacaaaaacatttcatccacatatttggggagaacgattcttacattacaacatttcacaacaagatttgtattgtcaacaacaaaaggttgaggaattaaaggaagtggttagaagagaaatatttggagaatcatcaatatcatcatcagcttattatgatgcttggaaaaatcaattgaagataattgatgtggtagaacgtttgggattgtcttatcattttgaaactgaaatagaaaataagcttcaatgcatttacaacaaaaccaatattgatgatgaagatttacaccatgtttctttacggtttagacttctacgacaacatggatttagaatttcttcggatatatttgaaaaattcaaagacgaggatgggaactttaaaaaatgcttggtaagtgatacccttggtttgcttagcttatatgaggctacacatttgagttgtgttggagaaaatatacttgatgaagcacttgctttcacaacaacacacttaaccgagtttttggcaaagaaaaaagaataccatgatgacgatgatccattatcaaaagaaatatctcgagccctagagaggcccttaagaaagaccctagtgaatcttcatgcaaggcatttcatttcgatatatgaaaaagatgattcacataacaaagtattgttacaacttgcaaaattagatttcaatctattacaatgcatgcacaaaaaggagctttgtgaagtcagcaggtggtggaaagaatcagattttgtacacaaatttccatttgcaagagataggattgtggaattgtacctttggatattaggagtttattatgaaccacaatactgtttggcaagaaatattttactcaaaatcatagctttggcctcaattgctgatgatatttatgatgcatatggtacatttgaagaacttgagatcctaactcatgcaattgaaaggtgggatataaattgtgtggataaactgaatcaagaatatatgcaaacattttataaggatgttttgaattgttatgaagagtttgagcaagtgctagaaaaagaagaacaatacaaagttcattatgcaaaagaagcgtttaagggattagtccgatctcatttggatgaagctcgatgtttgcatagaggactcatcccaagttttgaagagtacttgaaatttgctttggataattgtggttactacatgttgatactaagctctttggttggaatgaaaactaatattgtaacaaaagaagtttttgagtggctctcgaaagatcgaaagattattagagcatctgttactatttgtaggctcatggatgacatagctgaacacaagtttgaggaagatgattatgaggaacattcagcagtggaatgctatatgattgaacatggcgtttgtgaagaggaagcctatgatgaactgaataagctaataatgaatgcatggaaagaaataaatgaagagtttttgaagcctactaaagtagcttcacctatattacttcgtgctcttaacttttcaagggttatggatcttattttcaaatttggagatggttatacacacgttggaaaaatcaccaaagatattgttgctgctttgcttattcatccaatt

SEQ ID NO: 1391 - DNA, 1890 bp, synthetic construct
  misc_feature 1..1890: note = Description of Artificial Sequence: Synthetic polynucleotide
  source 1..1890: mol_type = other DNA
atggctgttcaccaattttctccatcaatagtatcatcactacctaccattagtacttataataataatcacttttgtagatttttcacaccaaaaacatctattagtcctatttcaaaaacaaaatcaaaatcaagcacttgctatcccatccaatgtactgtggtcaataatagtagccctagttctactattgttcgaagatcggccaattatgaacctccgatttggtctttcgattacattcaatctctttcaacccaatataagggagaatcctacactaggcaattaaataagttgaagaaagaagtgacaagaatgctccttggactggaaattaactctttagccctactcgagctaattgatacattgcaaaggcttggaatatcttaccattttaagaatgaaataaacactattttgaagaaaaaatacactgataattatattaacaataataatattattactaaccctaattataataatttatatgccattgctctcgaatttaggcttctacgccaacatggctatacagtacctcaagaaatttttaatgctttcaaggataagagagggaaatttaaaacatgcttgagtgatgatattatgggagtattgtgtttatatgaagcttcattctatgctatgaaacatgagaatattttggaggaaacaagaattttttcaactaaatgtcttaaaaaatacatggagaaaatggagaatgaggaagagaaaaaaatattattattagatgataataatattaatagtaatttgctattaattaatcacgctttcgagcttccgcttcattggagaataacaagatcggaagctaggtggttcattgacgaaatatatgagaaaaaacaagacatgaattcgactttgttcgagtttgcgaaattagattttaatatagtgcaatcaacacaccaagaagatttacaacatttatcgaggtggtggagggattgtaaacttggtgggaaattgaattttgctagagatagattgatggaagctttcttatgggatgttggactaaaattcgagggagaattcagctattttagaagaataaatgcaagattatttgtgcttataacaataattgatgatatttatgatgtatatggaactttggaggaattagagcttttcactagtgctgtcgaaagatgggatgtgaaattaatcaatgagttaccagattacatgaagatgcctttctttgttttacacaataccataaatgagatggggttcgatgtattagtacaacaaaactttgtcaacattgaataccttaagaaatcgtgggtagatttatgtaaatgttatttacaagaagcaaaatggtattatagtggataccaaccaacattggaagaatacactgagttgggttggctttcaataggagcatcagtaattcttatgcatgcttatttttgtttcacaaatcctataacaaaacaagacttgaaaagcttgcaattacaacatcattatcccaacataattaaacaagcatgcttgattacaaggcttgcagatgatttaggaacatcttcggatgaattgaatagaggcgacgttcctaaatcgattcaatgttacatgtacgataataatgctacagaagacgaagctcgtgaacacatcaagttcttgataagtgaaacatggaaggatatgaataagaaagatgaagatgagagttgtttatcagaaaattttgttgaagtttgcaaaaatatggctagaacagcactattcatatatgagaatggagatggacatggttctcagaatagtttatcaaaagaacgtatttcaaccttgattattactccaattaatattcctaaa

SEQ ID NO: 1392 - DNA, 1848 bp, synthetic construct
  misc_feature 1..1848: note = Description of Artificial Sequence: Synthetic polynucleotide
  source 1..1848: mol_type = other DNA
ttgggagttcatcaattttctccactttcattaatccttagttctacaaaattagcaagagcaagagaaagtaataaatcaagattatcaagtgcttgctaccccatccaatgtactatggtcaatagtacaaatattcctaataatactactatatttgataatcatattcatagaagatcagccaattatgaacctcccatttggtcttttgattacattcaatctctttcatcaagccaatataagggagaaacatgtacaagtagattgaatgagctagaagcaaatgtgaaagagatattgttagttgagatgaaatttaactctttagctcaacttgagttgattgatgcattgcaaagacttggattatcttatcgtttcgagactgaaataaacactattttgaataaaaattactccaataatgttatcaataaccctaattataatttgtacgccacagctctcgaatttaggcttctacgacaacatggttatgatgtatctcaagaaattttcaatgtgtttaaggatgagattacaagcaagttcaaggcaagaaggagtagcaaagatataattggagtattggctttatacgaagcttcattctatggcaaaaaaggcgaaagtattttggaagaagctagggtttcctcaaccaaatgtcttgaaaattatgcagcgacgatgacgatggagcaaagcaatccatcattattagttaatgattatgatgatgataataatatgttattattagtaaatcatgtcttggagcttccacttcattggagaataacaagatcagaagcaaggtggttcattgatttatatgaaaaaaatcataacatgaattctactttgcttgaatttgccaaattggattacaacatggtacaatcaatatatcaagaagatctaaaacatctctcaaggtggtggagccatacaaaacttggagagaaaatggatttctttagagttagaataatggagtgtttcttatggactgtgggagtaacatgtgagccagaacaaagctattatagaagaatgtctggaagattgtatgttctaataacaacaattgatgatatatatgatgtttatggaacattggaggaattagagcttttcactaatgctgttgagagatgggatgtgaaagcaatggatgatttaccagaatatatgaggatgcctttctttcttttacacaataccataaatgaaatggctttcgatgtgttaggagaccaaaatttcctcaacattaaattccttaagaaaacgtgggcagatttttgtaaacatcaattacaagaggcgaaatggtttcacagtggatacaaaccaacattcgaagaatacattaacaatgcatggatttcagtatcaggaccgattattcttattgatgcttatttctctcttacaaatcctgttacaaaagatgccataaatttactggaattaggttatccacccatattttaccacgcatccatgattctacgacttacagatgatctgggaacatcgcctgatgaaatgaaaagaggtgatattccaaaatcaattcaatgttacatgaacgatacaggtgtttctgaagatgaagctcgagatcatatgaagtttctaataagtgaattatggaaggaaataaataatgaagatgaaaatatggactctcctttctcaaaacaatttcttcaaaattgtaaaaatcttgctagaatatcacaatttatatatcaatatggagatggacatgcttctcaggatagtttatcaaaacaaagaatttcagaattgataattaatcatattccttct

SEQ ID NO: 1393 - DNA, 1785 bp, synthetic construct
  misc_feature 1..1785: note = Description of Artificial Sequence: Synthetic polynucleotide
  source 1..1785: mol_type = other DNA
gtattttttagaccaaaagtatatactaattataatattattaataataatgctacaaaatcaagattatcaagtgcatgctaccccatccaatgtgctgtggtcaatagttctaatgcaattattgatcgacgatctgccaactttgagccctccatttggtcttttgattatattcaatctcttacaagtcaatataagggagaaccttatacaagtcgagtgaaaaaacttgagagagatgtgaaaaagatgttagttgagatggaaaactctttagctcaacttgaactcattgatacattgcaaagacttggaatatcttaccgttttgagaatgaaataaattctattttgaacaaaaaatatgttaatattaataatcctaattataatttatatgccattgctcttcaatttaggcttctacgtcaacatggctatgcagtacctcaagagatttttaatcagttgaaggacgagatagaaaacatcaaaaaacacataaatggtaatgatatcatgggagtattagccttatacgaagcttctttttatgagaaaaaaggcgaaagtattttaaaggaagctagaattttcacaactaaatgtctcaaaaactacactataatgatatcagagcaaaaaaagttaatgattgataatgattatgattatgatatcgaagtagtgaatcatgccttagagctcccacttcatcggaggaccacaagaacagaagcaaagtggttcattgacgcatatgcgaaaaaacaagacatgaatcctatgttgcttgagttagccaaactcgatttcaacatagtacaatcaacacatcatgaagatctaaaacatatattcaggtggtggagacatactaaacttggagagaaattgaattttgcaagagatcgattgatggaatgtttcttatggaatattggaataagatttgagtcaaaattcagctattttagaacaaaaactgccaaattatttgagctagtaacatttatagatgatatatatgatgtttatggaacattggatgaattagagcttttcaccaaagctgttgagagatgggatgtgaaaatgataaatgagttaccagaatacatgaagatgccttatcttgttttacacaataccataaatgatatggtatttgaggtgttaagagaccaagaaatttccatcaacattcaataccttaagaaaacgtgggtcgatatgtgtaaaagtttcttgcaagaggcaaaatggtactatagtggatacacaccaacattggaagaatatattgaaaatggttggatttcagtaggagcaccagttattcttgtgcatgcttatttttttcacgcaaataataatcgtacaattacaaatactaaagagattttcgaatgcttggaatatggttattatcctgccattattcgtcacagtgccataatattacgatttacaaatgacctagcaacatcatcggaggaattgaaaagaggtgatgctccgacatcaattcaatgttacatgcaagaaaaaaatgtatctgaagaggaagctcgtgaacatgttaagtttttaataaatgaagcatggaaggagatgaataatgatgttggattatatccaatctcattgactgaagatgctacaaactttgctaagatgggatttttcatatatcaacatggtgatggtcatagttctcaagataatcaatccaaacaaaaaatttcatccttgattattgaacctattcccctatataca

SEQ ID NO: 1394 - DNA, 1833 bp, synthetic construct
  misc_feature 1..1833: note = Description of Artificial Sequence: Synthetic polynucleotide
  source 1..1833: mol_type = other DNA
ttgggagttcatcaattttctccactttcattaatccttaatactacaaaattagcaagagcaagtacattatcaagtgcttgctaccccatccaatgtactatggtcaatagtacaaatattactaataatactactatatttgataatcatattcatagaagatcagccaattatgaacctcccatttggtcttttgattacattcaatctctttcatcaagccaatataagggagaaacatgtacaagtagattgaatgagctagaggcaaatgtgaaagagatattgttagttgagatgaaatctaactctttagctcaacttgagtttattgatgcattgcaaagacttggattatcttaccgtttcgagactgaaataaacactattttaaatgaaaagtactccggtaatattatcgataaccctaattataatttgtacgccacagctctcgaattcaggcttctacgccatcatggttatgatgtatctcaagaaattttcaatgtgtttaaggatgagattacaagcaagttcaaggcaagaacgagtggcgaagatataattggagtattggctttatacgaagcttcattctatggcaaaaaaagtgaaagtattttggaagaagctagggtttcctcaatcgaatgtctcgaaaattacgtagcaactatgacgatggagcgaaacaaaccatcattattagtcaatgattatgatgatgataataatatgttattattagtgaatcatgccttggagcttccactttattggagaataacaagatcagaagcaaggtggttcattgatttatatgaaaaaaatcataacatgaattctactttgcttgaatttgccaaattggattacaacatggtacaatccatatatcaagaagatctaaaacatctctcaaggtggtggagccatacaaaacttggagagaaaatggatttctttagagatagattaatggagtgtttcttatggactgtgggaatagcatgtgagccagaaaaaagctattatagaagaatgtctggaagattatatgttctaataacaacaattgatgatatatatgatgtttatggaacattggaggaattagagcttttcactaatgcagttgagagatgggatgtgaaagcaatggatgatttaccagaatatatgaggatgcctttctttcttttacacaataccataaacgaaatggctttcgatgtgttaggacaccaaaatttcctcaacgttaaattccttaagaggacgtgggtagatttctgtaaacatcaattacaagaggcaaaatggtttcacagtggatacaaaccaacattcgaagaatacattaacaatgcatggatttcggtatcaggaccgattattcttatggatgcttatttctctcttacaaatcctgttacaaaagatgccataaatttactggaattaggttatccacccataatttaccatgcatccatgattctacgacttacagatgatctaggaacatcgaatgatgaaatgaaaagaggtgatattccgaaatcaattcaatgttacatgaacgatacaggtgtttctgaagatgaagctcgagatcatatgaagtttctaataagtgaattatggaaggaaataaataatgaagatgaaaatatggactctcctttctcaaaacaatttcttcaaaattgtaaaaatcttgctagaatatcacaatttatatatcaatatggagatggacatgcttctcaggatagtttatcaaaacaaagaatttcagaattgataattaatcatattccttct

SEQ ID NO: 1395 - DNA, 1791 bp, synthetic construct
  misc_feature 1..1791: note = Description of Artificial Sequence: Synthetic polynucleotide
  source 1..1791: mol_type = other DNA
gtattttatagaccaaaaatatatactaactataatattattaatggtggtacaaaatcaagattatcaagtgcatgctaccccatcatatgtgctgtggtcaatagttctaatgcaattattgatcgacgatctgccaactttgagccctccatttggtcttttgattatattcaatctcttacaagccaatataaggaagaatcttatacaggtcgagtcaaagaattggagatagatgtgaaaaagatgttaattgagatggaaaattctttaattcaacttgaactcattgacacattgcaaagacttggagtatcttatcgttttgaggatgaaataaatactattttgaaagaaaaatatattaatatgatcaataaccctaattataataatttatatgtcactgctcttgaatttaggcttctacgtcaacatggctatgcagtacctcaagagatttttaatcattttaaggacgagataggaaaaatcaaaacgaacatgattagtgatgatattatggaagtattggccttatatgaagcttcattctatgagaaaaaggaaagtattttagaagaagttagaattttcacaactcaatatctaaagaactacattataatgatatcacaagaaagaaagttaatgattgataatgataatgattatgattatgatatcgaaatagtgaatcacgctttggagctcccacttcattggaggactacaagaacagaagctaagtggttcatcgacgcgtatgagaaaaaacaagacatgaatcctattttgcttgagtttgctaaactcgatttcaacatgatacaatcaacacatcatgacgatctaaaacatatattcaggtggtggaggcatactaaacttggggagaaattgaattttgcaagagatcgattgatggaatgtttcttatggaaagttggaataagatttgagccaaaattcagttattttagaaaaacaactgccaaattatttgagctaataacagtaattgatgatatatatgatgtttatggaacattggatgaattagagcttttcaccaaagctattgagagatgggatatggaaatgataaatgagttaccagaatatatgaagatgccttatattgttttacacaataccattaatgaaatggtatttgaggtattaagagaccaacacatctccatcaacattcaataccttaagaaaacgtgggtagatatgtgtagaggttttttacaagaggcaaaatggtactatagtggatatacaccaacactagaagaatatattaaaaatggttggatttcagtgggagcaccggttctaattgtgcatgcttatttttctcatgcaaattataatcacacagttacaagtagtaaagagattttcgaatgctttgaacatggttattatcccgccataattcgtcatagtgccataatattacgacttacaaatgacctagcaacatcatcggaggaactgaaaagaggtgatgctccgacatcaattcaatgttatatgcaagaaaaaaaagtatctgaggagaaagctcgtgaacatattaagtttttaataagtgaaatatggaaagagatgaataatgatgttggattatatccaatctcattgattgaagatgctacaaattttgctaagatgggatttttcatgtatcagcatggtgatggtcatagttctcaagataatcaatccaaacaaaaaatttcatccttgattattgaacctattcccttatataca

SEQ ID NO: 1396 - DNA, 2152 bp, synthetic construct
  misc_feature 1..2152: note = Description of Artificial Sequence: Synthetic polynucleotide
  source 1..2152: mol_type = other DNA
gacttgtaatatcatcgaaattgaaagacacaggaaaaatataaaaataaataaaagataaacattatggacacacagagaaaattgcaagcagagcaactatcttgcccaaccaagtctcatgaactaatatttgatcataaatctgatcatcaaagacgttcggccaattatacgccaaccatttggaaatatgatttcctggagtctcttaacaacaaatatgatagtgaagagtacaaaaagctgtctgagaagcttatcgaggatgtgaggcatattattgttgaaactaaagacttaaagggtatgctagagctgattaacaccatcagaaaactaagcttgacatatcatttcgaagacgaagtcaagaaagttcttgacaaaatatcatcttccgattactactacaacaataatgacattaaagatcccctcgtaggagacgatctctatctcgctgcattatatttcaggcttcttaggcttcatggatatcatgtttcacaaggcatatttgttgggtacaatagtgtggattacaaaaaaggtggtgggacacataatattacatcaacagaggtgaaagtgatgatagagcttttagaggcctcacatgtagcttttgagtgtgaggagatgctaactgaggctaaagctttgatggaagaaaacctcaaaattgcctttcctgacaacggcaacaaatatcttcccaaacatgaggtggttcatgctttggaacttccatctcattggagggttcagtggtttgacgtaaaatggcaaatagaagcttatcgtcaaggtgacccggataccaacactacaactactactagtctcttggttgatttagccaaattaaactttaacatagttcaagccacacttcaaaaagatcttagggagttgtccagttggtggaagaatgtgggcctttcagagaagttggattttgcgagagataggctggtcgagagcttcatgtgtactgtgggactggcttttcagcctgaatacaaaagtctgagaaaatgtcttaccaaagtggtcaatttcatactcattgttgatgatgtttatgatgtttatggctcattggaagagctcagacacttcaccaatgccgttgataggtgggatgtacgggaaactgaaaaacttccagattgcatgaagatttgtttccaagcactctaccatactacatgtgaaattgctagtgaaattgagactaagaacggttgcaagttagttttacctcatctaaagggagcgtggacagacttttgtaaatcactattaatggaggcagaatggtaccacaaggggtatatcccatccattgaggagtatttaagcaatgcttggatttcatcttcgggccctcttcttcttcttcattcatatcttgctatgccaaatcagactaatacggcctcttctcttgacataagcaaagatcttgtctacaacatttctctcatcattcgactatgcaacgatttaggaacttcagcggctgaacaggaaagaggagatgctgcatcttctatcgtatgttatatgcaagaaacgaagagtagtgaagaggaggcccgaaagcatatccgagaaatgattagaaaaacatggaagaagatcaacaagacatgctttagtacttgcggcagtagttcactatcattatcatttatagatattgcccttaacactgctcgagtggcacatagcctctaccaatctggagatgccttcagtgctcaacatacagactataagactcatattctctccttactcgttcaccctctcattcccaataagtaaactagctaggatgatgagtcctttaatgggtcaccatgtgttttcttttttataattaatagaaaaatttaggtggttaagcagtttattacaggttatgttatgattaattattattattattattattattattatttgttttctttttcatagtaattaagtttaagttttttatgtacaactcttcaaagcacgtgaacgatgtctcctgtactttgaggaattgagaatgtgtgtttgtcgttggtggttgatcactatagctagttgttatgtatcgtggtgattttagtgtaatttatattcagataaa

SEQ ID NO: 1397 - DNA, 1761 bp, synthetic construct
  misc_feature 1..1761: note = Description of Artificial Sequence: Synthetic polynucleotide
  source 1..1761: mol_type = other DNA
aattataattttgttagtagtactacaagatcaagattatcaagatcaagtgcttgctaccccattcaatgtactgtagtcgatagttctaatccaatgatcgatcgacgatcgggcaactatgaaccatccatttggtcttttgattatattcagtctcttacaagccaatatgagggagaaccttatagaagtcgggtgaaagagatcgagggagatgtgaaaaggatgctagttgagatggaaaattctttagctcaacttgagctcattgacacattgcaaagacttggagtatcttatcgctttgagaatgaaataagtactattttgaaggaaaaatatgtcaatgttaataaccctaattataatttatacgccattgctcttgaatttagacttctacgtcaacatggttatgcagtacctcaagagatttttaatcattttaaggacgagacaggaaaattcaaggcaaacataattagtgatgatattatgggagtattggccttatatgaagcttcattctatgagaaaaaaggcgaaagtattttagaggaagctagaattttcataaaaaaatatctcgaagactacactataatgatatcgcaagaaaagaaattaatgattgataatgattatgattataatttcgaagtagtgaatcatgcattagagctcccacttcattggaggactacaagaatagaagctaagtggttcatcgacgcgtatgagaaaaaacaagacatgaatcctattttgcttgaatttgctaaactcgatttcaacatgatacaatcaacacatcatgatgatctaaaacatatattcaggtggtggaggcatactaaacttggggagaaattgaattttgcaagagatcgattgatggaatgtttcttatggaaggttggagtaagatttgagccaaaattcagttattttagaaaaacaactgccaaattatatgagctaataacattaattgatgatatatatgatgtttatggaacattggatgaattagagcttttcaccaaagctgttgagagatgggatgtgacaatgataaatgagttaccagaatacatgaagatgccttttcttgttttacacaatacaataaatgaaatagtatttgagatattaagagacaaagacatctccatcaacattcaataacttaagaaaacgtggatagatatgtgtagaggttttctacaagaagcaaaatggtactatagtggatacacaccaacattggaagaatatatagaaaatggttggatctcagtgggagcaccagttcttattgtgcatgcttatttttctcattcaaataataataaacttgtctaagtttcagatgaagaagtggaatgtcttaaagagggttatcccaatattgttcgacatggatccctaatattacgacttgcagatgatctaggaacatgttcggatgaaatgaaaagaggcgatgttcctacatcaattcaatgttacatgcatgatactggtgtttctgaagacgaagctcgtgagcacatcaagcatttgataagcgaatcatggaaggagatgaataatgaaaatggagatcataattcttctttctcgaaagaatttgttcatgtttgcaaaaatcttggtagagcgtcacaatttatataccaatatggagatggacatgcttctcaaaatactctatcaaaagatcgtatttttaaaattattattaatcctttcccc

SEQ ID NO: 1398 - DNA, 20 bp, synthetic construct
  misc_feature 1..20: note = Description of Artificial Sequence: Synthetic primer
  source 1..20: mol_type = other DNA
tgctacatgcgtgaaaaggg

SEQ ID NO: 1399 - DNA, 22 bp, synthetic construct
  misc_feature 1..22: note = Description of Artificial Sequence: Synthetic primer
  source 1..22: mol_type = other DNA
tgtgatacatctccattgctcc

SEQ ID NO: 1400 - DNA, 20 bp, synthetic construct
  misc_feature 1..20: note = Description of Artificial Sequence: Synthetic primer
  source 1..20: mol_type = other DNA
tttttttttttttttttttt

SEQ ID NO: 1401 - DNA, 23 bp, synthetic construct
  source 1..23: mol_type = other DNA
tgtttagagtttgctgttaggca

SEQ ID NO: 1402 - DNA, 21 bp, synthetic construct
  source 1..21: mol_type = other DNA
ggtgagaccgccgtatatctt

SEQ ID NO: 1403 - DNA, 20 bp, synthetic construct
  source 1..20: mol_type = other DNA
tgaggcttcgcacttgagtt

SEQ ID NO: 1404 - DNA, 20 bp, synthetic construct
  source 1..20: mol_type = other DNA
ggcctatgcaaggctatgga

SEQ ID NO: 1405 - DNA, 20 bp, synthetic construct
  source 1..20: mol_type = other DNA
gaagcacttgctttcacaaa

SEQ ID NO: 1406 - DNA, 19 bp, synthetic construct
  source 1..19: mol_type = other DNA
ggcctatgcaaggctatgg

SEQ ID NO: 1407 - DNA, 1656 bp, synthetic construct
  source 1..1656: mol_type = other DNA
atgtcaaatattcaagtcttagcttcatctcaattaagtgacaaaattgttgctcgyccaacaacaaaatttcacccttctatttggggcgatcgattcctccattacaatatttcagaacaagacttggtttgcaaacaagaaaraattgaagaattaatacaagttgtaaagaaagagatattatcttcaaatcatgatcaattgaagttgattgacaatctccaacgtttgggattatcatatcattttgagagtgaaattgagaaattgttggaacaattaagtaccactcatcatcaaaatcatcaagatctacatgatgcttctctttggtttagattattaagacaacatggatttaatgtttcatcaagtatatttgaaaaattcaaagacgaggaaggtaactttaaagaaagcctaataacygatgttccaggtttgcttagcttgtatgaggcttcgcacttgagttatgttggagaaagcatactagatgaagcacttgctttcacaaccactcaccttaaggctattgtggcaaatagtaaagatcatccattatcacatcaaatatccatagccttgcataggcctctaagaaagaccatagagaggcttcatgctaggttttacatctcaatctatgaaaaggatgcctctcataacaaactattgctagagcttgcaaagttagacttcaatctacttcaatgtttccacaaaaaggaacttagtgaaattacgaggtggtggaaggagcatgagtttgcaaagaaattcccttttgcaagagataggatggtggaactgtatttttggatattgggtgtatattatgaacccaaatactctcgagcaaggaagcttttaaccaaagtcattgcattgacctcaatcactgatgatatttatgatgcatatggtactattgatgagcttcagcttcttaccaaagcaattcaaaggtgggacataaattgtatggataaacttaagcaagaatatttaaagacatattataaggtaatgttggattcttatgaagaatttgaaaaggagcttaaaaaggaagaattatacaaacttgagtatgcaaaagaagagatgaaaagaattattggaggttattttgaagaagctcgatggttgaatgaaggatatttcccaagcttcgatgagcatttgagagtctcttatgtttcttctggtaacgttttgttgatagccacaagttttgtagggatgcatgatgttgtaacacatgaaactctagattggctctccaaagaccctaaaattgtttcagcttccactctccttkctaggttcatggatgatattggttctcgcaagtttgagcaaaagagaaatcacataccatctacagtggattgttacatgaaacaatatggggtatcagaggaagaggcaattaaagaacttaataaaagagtggacacccactggaaagaaattaatgaagactttattaggccagcagttgtgccctttcctatcttagttcgtgttcttaattttacaaaaatagtagatcttctttacaaagagggcgatgatcaatacacaaatgttggaaaagtgctcaaagaaagcattgctgctttgcttatagattcaatcccattataa

SEQ ID NO: 1408 - DNA, 1656 bp, synthetic construct
  source 1..1656: mol_type = other DNA
atgtcaaatattcaagtcttagcttcatctcaattaagtgacaaaattattgctcgtccaacaacaaaatttcacccttctatttggggtgatcgattcctccattacaatatttcagaacaagacttggtttgcaaacaagaaaaagttgaagaattaatacaagttgtaaagaaagagatattatcttcaaatcatgatcaattgaagttgattgacaatctccaacgtttgggattatcatatcattttgagagtgaaattgagaaattgttggaacaattaagtaccactcatcatcaaaatcatcaagatctacatgatgcttctctttggtttagattattaagacaacatggatttaatgtttcatcaagtatatttgaaaaattcaaagacgaggaaggtaactttaaagaaagcctaataacygatgttccaggtttgcttagcttgtatgaggcttcgcacttgagttatgttggagaaagcatactagatgaagcacttgctttcacaaacactcaccttaaggctattgtggcaaatagtaaagatcatccattatcacatcaaatatccatagccttgcataggcctctaagaaagaccatagagaggcttcatgctaggttttacatctcaatctatgaaaaggatgcctctcataacaaactattgctagagcttgcaaagttagacttcaatctacttcaatgtttccacaaaaaggaacttagtgaaattacgaggtggtggaaggagcatgagtttgcaaagaaattcccttttgcaagagataggatggtggaactgtatttttggatattgggtgtatattatgaacccaaatactctcgagcaaggaagcttttaaccaaagtcattgcattgacctcaatcactgatgatatttatgatgcatatggtactattgatgagcttcagcttcttaccaaagcaattcaaaggtgggacataaattgtatggataaacttaagcaagaatatttaaagacatattataaggtaatgttggattcttatgaagaatttgaaaaggagcttaaaaaggaagaattatacaaacttgagtatgcaaaagaagagatgaaaagaattattggaggttattttgaagaagctcgatggttgaatgaaggatatttcccaagcttcgatgagcatttgagagtctcttatgtttcttctggtaacgttttgttgatagccacaagttttgtagggatgcatgatgttgtaacacatgaaactctagattggctctcgaaagaccctaaaattgtttcagcttctactctcctttctaggttcatggatgatattggttctcgcaagtttgagcaaaagagaaatcacataccatctacagtggattgttacatgaaacaatatggggtatcagaggaagaggcaattaaagaacttaataaaagagtggacacccactggaaagaaattaatgaagactttattaggccagcagttgtgccctttcctatcttagttcgtgttcttaattttacaaaaatagtagatcttctttacaaagagggcgatgatcaatacacaaatgttggaaaagtgctcaaagaaagcattgctgctttgcttatagattcaatcccattataa

SEQ ID NO: 1409 - DNA, 21 bp, synthetic construct
  source 1..21: mol_type = other DNA
tggatttcagtaggagcacca

SEQ ID NO: 1410 - DNA, 24 bp, synthetic construct
  source 1..24: mol_type = other DNA
attccaagcattcgaaaatctctt

SEQ ID NO: 1411 - DNA, 20 bp, synthetic construct
  source 1..20: mol_type = other DNA
aagaggagatgttccgaaat

SEQ ID NO: 1412 - DNA, 19 bp, synthetic construct
  source 1..19: mol_type = other DNA
tctgagaagcatgtccatc

SEQ ID NO: 1413 - DNA, 60 bp, synthetic construct
  source 1..60: mol_type = other DNA
  misc_difference 24..38: note = This region may encompass 3-15 nucleotides or may be absent
tcaaaaatttgatgtgctcgcgatttttttttttttttaatgttacatgaacgatacagg

SEQ ID NO: 1414 - DNA, 65 bp, synthetic construct
  source 1..65: mol_type = other DNA
  misc_difference 26..40: note = This region may encompass 3-15 nucleotides or may be absent
ctcgaaagaagttgttcatgtttgctttttttttttttttccataaaggtatataaatttggctg

SEQ ID NO: 1415 - DNA, 22 bp, synthetic construct
  source 1..22: mol_type = other DNA
aatgttacatgaacgatacagg

SEQ ID NO: 1416 - DNA, 23 bp, synthetic construct
  source 1..23: mol_type = other DNA
tcaaaaatttgatgtgctcgcga

SEQ ID NO: 1417 - DNA, 25 bp, synthetic construct
  source 1..25: mol_type = other DNA
ccataaaggtatataaatttggctg

SEQ ID NO: 1418 - DNA, 25 bp, synthetic construct
  source 1..25: mol_type = other DNA
ctcgaaagaagttgttcatgtttgc

SEQ ID NO: 1419 - DNA, 22 bp, synthetic construct
  source 1..22: mol_type = other DNA
agaatacatggatttcagttgg

SEQ ID NO: 1420 - DNA, 24 bp, synthetic construct
  source 1..24: mol_type = other DNA
gatattaagggagtattggcttta

SEQ ID NO: 1421 - DNA, 23 bp, synthetic construct
  source 1..23: mol_type = other DNA
tcatattcttcaatgaaccactt

SEQ ID NO: 1422 - DNA, 63 bp, synthetic construct
  source 1..63: mol_type = other DNA
  misc_difference 26..40: note = This region may encompass 3-15 nucleotides or may be absent
tgagatattctgttgtgaaaacccttttttttttttttttttcattctatgtgaaaaatggyg

SEQ ID NO: 1423 - DNA, 61 bp, synthetic construct
  source 1..61: mol_type = other DNA
  misc_difference 26..40: note = This region may encompass 3-15 nucleotides or may be absent
tatggcaatattagtgagacatgcctttttttttttttttgcttctgctcttatagtcctc

SEQ ID NO: 1424 - DNA, 23 bp, synthetic construct
  source 1..23: mol_type = other DNA
ttcattctatgtgaaaaatggyg

SEQ ID NO: 1425 - DNA, 25 bp, synthetic construct
  source 1..25: mol_type = other DNA
tgagatattctgttgtgaaaaccct

SEQ ID NO: 1426 - DNA, 21 bp, synthetic construct
  source 1..21: mol_type = other DNA
gcttctgctcttatagtcctc

SEQ ID NO: 1427 - DNA, 25 bp, synthetic construct
  source 1..25: mol_type = other DNA
tatggcaatattagtgagacatgcc

SEQ ID NO: 1428 - DNA, 19 bp, synthetic construct
  source 1..19: mol_type = other DNA
tttggaagaggcaaaatgg

SEQ ID NO: 1429 - DNA, 20 bp, synthetic construct
  source 1..20: mol_type = other DNA
gatcatctgcaagtcgtaac

SEQ ID NO: 1430 - DNA, 56 bp, synthetic construct
  source 1..56: mol_type = other DNA
  misc_difference 21..35: note = This region may encompass 3-15 nucleotides or may be absent
cctattgaaagcgaggcgtttttttttttttttttytatagcggatacaaaccaac

SEQ ID NO: 1431 - DNA, 57 bp, synthetic construct
  source 1..57: mol_type = other DNA
  misc_difference 25..39: note = This region may encompass 3-15 nucleotides or may be absent
acaaagtccataacaaaygaggcctttttttttttttttaaggatccttggcgacat

SEQ ID NO: 1432 - DNA, 21 bp, synthetic construct
  source 1..21: mol_type = other DNA
ytatagcggatacaaaccaac

SEQ ID NO: 1433 - DNA, 20 bp, synthetic construct
  source 1..20: mol_type = other DNA
cctattgaaagcgaggcgtt

SEQ ID NO: 1434 - DNA, 18 bp, synthetic construct
  source 1..18: mol_type = other DNA
aaggatccttggcgacat

SEQ ID NO: 1435 - DNA, 24 bp, synthetic construct
  source 1..24: mol_type = other DNA
acaaagtccataacaaaygaggcc

SEQ ID NO: 1436 - DNA, 20 bp, synthetic construct
  source 1..20: mol_type = other DNA
ttgcaagagggtcatyacgc

SEQ ID NO: 1437 - DNA, 18 bp, synthetic construct
  source 1..18: mol_type = other DNA
ggaaggagcatatgccaa

SEQ ID NO: 1438 - DNA, 23 bp, synthetic construct
  source 1..23: mol_type = other DNA
agtctaaattcaagagaattggc

SEQ ID NO: 1439 - DNA, 60 bp, synthetic construct
  source 1..60: mol_type = other DNA
  misc_difference 24..38: note = This region may encompass 3-15 nucleotides or may be absent
gcttctcctcctcttttgctctctttttttttttttttgagttgagaaagtaaaggaaga

SEQ ID NO: 1440 - DNA, 63 bp, synthetic construct
  source 1..63: mol_type = other DNA
  misc_difference 26..40: note = This region may encompass 3-15 nucleotides or may be absent
aagacttggaatctcttaccacttttttttttttttttttgtgttgtacacattattgttgtt

SEQ ID NO: 1441 - DNA, 22 bp, synthetic construct
  source 1..22: mol_type = other DNA
gagttgagaaagtaaaggaaga

SEQ ID NO: 1442 - DNA, 23 bp, synthetic construct
  source 1..23: mol_type = other DNA
gcttctcctcctcttttgctctc

SEQ ID NO: 1443 - DNA, 23 bp, synthetic construct
  source 1..23: mol_type = other DNA
gtgttgtacacattattgttgtt

SEQ ID NO: 1444 - DNA, 25 bp, synthetic construct
  source 1..25: mol_type = other DNA
aagacttggaatctcttaccacttt

SEQ ID NO: 1445 - DNA, 21 bp, synthetic construct
  source 1..21: mol_type = other DNA
catatgccaaaagagttgaga

SEQ ID NO: 1446 - DNA, 23 bp, synthetic construct
  source 1..23: mol_type = other DNA
aattggcatacacattattgttg

SEQ ID NO: 1447 - DNA, 61 bp, synthetic construct
  source 1..61: mol_type = other DNA
  misc_difference 25..39: note = This region may encompass 3-15 nucleotides or may be absent
tcaagttgagataaaggcttctcctttttttttttttttaggaagaggtaagagtaatggt

SEQ ID NO: 1448 - DNA, 22 bp, synthetic construct
  source 1..22: mol_type = other DNA
aggaagaggtaagagtaatggt

SEQ ID NO: 1449 - DNA, 24 bp, synthetic construct
  source 1..24: mol_type = other DNA
tcaagttgagataaaggcttctcc

SEQ ID NO: 1450 - DNA, 23 bp, synthetic construct
  source 1..23: mol_type = other DNA
ggtcgatatgtgtaaaagtttct

SEQ ID NO: 1451 - DNA, 18 bp, synthetic construct
  source 1..18: mol_type = other DNA
tatggcactgtgacgaat

SEQ ID NO: 1452 - DNA, 60 bp, synthetic construct
  source 1..60: mol_type = other DNA
  misc_difference 26..40: note = This region may encompass 3-15 nucleotides or may be absent
tcctactgaaatccaaccattttcatttttttttttttttgcaagaggcaaaatggtact

SEQ ID NO: 1453 - DNA, 60 bp, synthetic construct
  source 1..60: mol_type = other DNA
  misc_difference 26..40: note = This region may encompass 3-15 nucleotides or may be absent
cttgtgcatgcttatttttttcacgtttttttttttttttaaccatattccaagcattcg

SEQ ID NO: 1454 - DNA, 20 bp, synthetic construct
  source 1..20: mol_type = other DNA
gcaagaggcaaaatggtact

SEQ ID NO: 1455 - DNA, 25 bp, synthetic construct
  source 1..25: mol_type = other DNA
tcctactgaaatccaaccattttca

SEQ ID NO: 1456 - DNA, 20 bp, synthetic construct
  source 1..20: mol_type = other DNA
aaccatattccaagcattcg

SEQ ID NO: 1457 - DNA, 25 bp, synthetic construct
  source 1..25: mol_type = other DNA
cttgtgcatgcttatttttttcacg

SEQ ID NO: 1458 - DNA, 23 bp, synthetic construct
  source 1..23: mol_type = other DNA
ttccaatgttggtgtgtatccac

SEQ ID NO: 1459 - DNA, 18 bp, synthetic construct
  source 1..18: mol_type = other DNA
agtttcttgcaagaggca

SEQ ID NO: 1460 - DNA, 18 bp, synthetic construct
  source 1..18: mol_type = other DNA
ttatggcactgtgacgaa

SEQ ID NO: 1461 - DNA, 65 bp, synthetic construct
  source 1..65: mol_type = other DNA
  misc_difference 26..40: note = This region may encompass 3-15 nucleotides or may be absent
tcctactgaaatccaaccattttcatttttttttttttttaaatggtactatagtggatacacac

SEQ ID NO: 1462 - DNA, 60 bp, synthetic construct
  source 1..60: mol_type = other DNA
  misc_difference 26..40: note = This region may encompass 3-15 nucleotides or may be absent
cttgtgcatgcttatttttttcacgtttttttttttttttaccatattccaagcattcga

SEQ ID NO: 1463 - DNA, 25 bp, synthetic construct
  source 1..25: mol_type = other DNA
aaatggtactatagtggatacacac

SEQ ID NO: 1464 - DNA, 20 bp, synthetic construct
  source 1..20: mol_type = other DNA
accatattccaagcattcga

SEQ ID NO: 1465 - DNA, 25 bp, synthetic construct
  source 1..25: mol_type = other DNA
gcaaatcttatttaagagaagcaag

SEQ ID NO: 1466 - DNA, 22 bp, synthetic construct
  source 1..22: mol_type = other DNA
cgtaaaatcatrgatgaatgtc

SEQ ID NO: 1467 - DNA, 64 bp, synthetic construct
  source 1..64: mol_type = other DNA
  misc_difference 26..40: note = This region may encompass 3-15 nucleotides or may be absent
ggycctgatattgatatccatgcattttttttttttttttatggtattataatggatacacacc

SEQ ID NO: 1468 - DNA, 63 bp, synthetic construct
  source 1..63: mol_type = other DNA
  misc_difference 26..40: note = This region may encompass 3-15 nucleotides or may be absent
ttgtagtgaatccaawcaaggaaratttttttttttttttgtattatggtagggtatccatca

SEQ ID NO: 1469 - DNA, 24 bp, synthetic construct
  source 1..24: mol_type = other DNA
atggtattataatggatacacacc

SEQ ID NO: 1470 - DNA, 25 bp, synthetic construct
  source 1..25: mol_type = other DNA
ggycctgatattgatatccatgcat

SEQ ID NO: 1471 - DNA, 23 bp, synthetic construct
  source 1..23: mol_type = other DNA
gtattatggtagggtatccatca

SEQ ID NO: 1472 - DNA, 25 bp, synthetic construct
  source 1..25: mol_type = other DNA
ttgtagtgaatccaawcaaggaara

SEQ ID NO: 1473 - DNA, 22 bp, synthetic construct
  source 1..22: mol_type = other DNA
attatcatcatcatggtcaaca

SEQ ID NO: 1474 - DNA, 21 bp, synthetic construct
  source 1..21: mol_type = other DNA
agacgagaaaaaggagttcaa

SEQ ID NO: 1475 - DNA, 58 bp, synthetic construct
  source 1..58: mol_type = other DNA
  misc_difference 26..40: note = This region may encompass 3-15 nucleotides or may be absent
gatgaagcaagagatttcacaaccatttttttttttttttttgaccttgcctcgtcat

SEQ ID NO: 1476 - DNA, 62 bp, synthetic construct
  source 1..62: mol_type = other DNA
  misc_difference 26..40: note = This region may encompass 3-15 nucleotides or may be absent
tatgggttcacccctaaatgaatagtttttttttttttttggagagtttgagtaaagatgtg

SEQ ID NO: 1477 - DNA, 18 bp, synthetic construct
  source 1..18: mol_type = other DNA
ttgaccttgcctcgtcat

SEQ ID NO: 1478 - DNA, 25 bp, synthetic construct
  source 1..25: mol_type = other DNA
gatgaagcaagagatttcacaacca

SEQ ID NO: 1479 - DNA, 22 bp, synthetic construct
  source 1..22: mol_type = other DNA
ggagagtttgagtaaagatgtg

SEQ ID NO: 1480 - DNA, 25 bp, synthetic construct
  source 1..25: mol_type = other DNA
tatgggttcacccctaaatgaatag

SEQ ID NO: 1481 - DNA, 25 bp, synthetic construct
  source 1..25: mol_type = other DNA
agcctcatatagacataccattcct

SEQ ID NO: 1482 - DNA, 19 bp, synthetic construct
  source 1..19: mol_type = other DNA
aacattttgaccttgcctc

SEQ ID NO: 1483 - DNA, 21 bp, synthetic construct
  source 1..21: mol_type = other DNA
ttttcaatgctttcaaagacg

SEQ ID NO: 1484 - DNA, 64 bp, synthetic construct
  source 1..64: mol_type = other DNA
  misc_difference 26..40: note = This region may encompass 3-15 nucleotides or may be absent
aggggtgaacccatattagatgaagtttttttttttttttgtcatcatcaagtattgtttgaga

SEQ ID NO: 1485 - DNA, 62 bp, synthetic construct
  source 1..62: mol_type = other DNA
  misc_difference 26..40: note = This region may encompass 3-15 nucleotides or may be absent
agcctcatatagacataccattccttttttttttttttttagaaaaaggagttcaaggagag

SEQ ID NO: 1486 - DNA, 24 bp, synthetic construct
  source 1..24: mol_type = other DNA
gtcatcatcaagtattgtttgaga

SEQ ID NO: 1487 - DNA, 25 bp, synthetic construct
  source 1..25: mol_type = other DNA
aggggtgaacccatattagatgaag

SEQ ID NO: 1488 - DNA, 22 bp, synthetic construct
  source 1..22: mol_type = other DNA
agaaaaaggagttcaaggagag

SEQ ID NO: 1489 - DNA, 22 bp, synthetic construct
  source 1..22: mol_type = other DNA
gaacaaggaaatgattccatct

SEQ ID NO: 1490 - DNA, 25 bp, synthetic construct
  source 1..25: mol_type = other DNA
gaacacataaggaatttaatcagtg

SEQ ID NO: 1491 - DNA, 65 bp, synthetic construct
  source 1..65: mol_type = other DNA
  misc_difference 26..40: note = This region may encompass 3-15 nucleotides or may be absent
ttcgttaggacagcaatgatgatattttttttttttttttgtaatgatcaaaattagtaccaacc

SEQ ID NO: 1492 - DNA, 62 bp, synthetic construct
  source 1..62: mol_type = other DNA
  misc_difference 26..40: note = This region may encompass 3-15 nucleotides or may be absent
atggcagtttcaataaaagcttgagtttttttttttttttcatggaaggaaatgaatgaagc

SEQ ID NO: 1493 - DNA, 25 bp, synthetic construct
  source 1..25: mol_type = other DNA
gtaatgatcaaaattagtaccaacc

SEQ ID NO: 1494 - DNA, 25 bp, synthetic construct
  source 1..25: mol_type = other DNA
ttcgttaggacagcaatgatgatat

SEQ ID NO: 1495 - DNA, 22 bp, synthetic construct
  source 1..22: mol_type = other DNA
catggaaggaaatgaatgaagc

SEQ ID NO: 1496 - DNA, 25 bp, synthetic construct
  source 1..25: mol_type = other DNA
atggcagtttcaataaaagcttgag

SEQ ID NO: 1497 - DNA, 20 bp, synthetic construct
  source 1..20: mol_type = other DNA
atggagactcacccactcga

SEQ ID NO: 1498 - DNA, 25 bp, synthetic construct
  source 1..25: mol_type = other DNA
cgaaaattacatgatgataacagag

SEQ ID NO: 1499 - DNA, 19 bp, synthetic construct
  source 1..19: mol_type = other DNA
ttgcaaactcaagcaaagt

SEQ ID NO: 1500 - DNA, 65 bp, synthetic construct
  source 1..65: mol_type = other DNA
  misc_difference 26..40: note = This region may encompass 3-15 nucleotides or may be absent
aagctctaacgcatgtctaattacttttttttttttttttgaaaacaaattagatgatgacgatg

SEQ ID NO: 1501 - DNA, 60 bp, synthetic construct
  source 1..60: mol_type = other DNA
  misc_difference 22..36: note = This region may encompass 3-15 nucleotides or may be absent
cacttcattggaggactgcaatttttttttttttttgaattcatatcttgtcttttctcg

SEQ ID NO: 1502 - DNA, 25 bp, synthetic construct
  source 1..25: mol_type = other DNA
gaaaacaaattagatgatgacgatg

SEQ ID NO: 1503 - DNA, 25 bp, synthetic construct
  source 1..25: mol_type = other DNA
aagctctaacgcatgtctaattact

SEQ ID NO: 1504 - DNA, 24 bp, synthetic construct
  source 1..24: mol_type = other DNA
gaattcatatcttgtcttttctcg

SEQ ID NO: 1505 - DNA, 21 bp, synthetic construct
  source 1..21: mol_type = other DNA
cacttcattggaggactgcaa

SEQ ID NO: 1506 - DNA, 23 bp, synthetic construct
  source 1..23: mol_type = other DNA
ggccaagtggtttatcgatgtat

SEQ ID NO: 1507 - DNA, 25 bp, synthetic construct
  source 1..25: mol_type = other DNA
ggaaaacaaattagatgatgacgat

SEQ ID NO: 1508 - DNA, 20 bp, synthetic construct
  source 1..20: mol_type = other DNA
cgtcttgatgcattgattgt

SEQ ID NO: 1509 - DNA, 60 bp, synthetic construct
  source 1..60: mol_type = other DNA
  misc_difference 21..35: note = This region may encompass 3-15 nucleotides or may be absent
ctccgttcttgcagtcctcctttttttttttttttattgtagtaattagacatgcgttag

SEQ ID NO: 1510 - DNA, 62 bp, synthetic construct
  source 1..62: mol_type = other DNA
  misc_difference 26..40: note = This region may encompass 3-15 nucleotides or may be absent
gccaagtggtttatcgatgtatacgtttttttttttttttccatgttgaaatctagttttgc

SEQ ID NO: 1511 - DNA, 25 bp, synthetic construct
  source 1..25: mol_type = other DNA
attgtagtaattagacatgcgttag

SEQ ID NO: 1512 - DNA, 20 bp, synthetic construct
  source 1..20: mol_type = other DNA
ctccgttcttgcagtcctcc

SEQ ID NO: 1513 - DNA, 22 bp, synthetic construct
  source 1..22: mol_type = other DNA
ccatgttgaaatctagttttgc

SEQ ID NO: 1514 - DNA, 25 bp, synthetic construct
  source 1..25: mol_type = other DNA
gccaagtggtttatcgatgtatacg

SEQ ID NO: 1515 - DNA, 18 bp, synthetic construct
  source 1..18: mol_type = other DNA
agagaggacatcaagggt

SEQ ID NO: 1516 - DNA, 22 bp, synthetic construct
  source 1..22: mol_type = other DNA
cttggataaacttttgtgagtg

SEQ ID NO: 1517 - DNA, 61 bp, synthetic construct
  source 1..61: mol_type = other DNA
  misc_difference 26..40: note = This region may encompass 3-15 nucleotides or may be absent
gcactaaataaagcagcttcatcaatttttttttttttttgctgagcttatatgaagcctc

SEQ ID NO: 1518 - DNA, 56 bp, synthetic construct
  source 1..56: mol_type = other DNA
  misc_difference 21..35: note = This region may encompass 3-15 nucleotides or may be absent
caacacttggaagcgtccatttttttttttttttttttgaagtgtagttgccacat

SEQ ID NO: 1519 - DNA, 21 bp, synthetic construct
  source 1..21: mol_type = other DNA
gctgagcttatatgaagcctc

SEQ ID NO: 1520 - DNA, 25 bp, synthetic construct
  source 1..25: mol_type = other DNA
gcactaaataaagcagcttcatcaa

SEQ ID NO: 1521 - DNA, 21 bp, synthetic construct
  source 1..21: mol_type = other DNA
tttgaagtgtagttgccacat

SEQ ID NO: 1522 - DNA, 20 bp, synthetic construct
  source 1..20: mol_type = other DNA
caacacttggaagcgtccat

SEQ ID NO: 1523 - DNA, 25 bp, synthetic construct
  source 1..25: mol_type = other DNA
attttctccctctatgcatagatgg

SEQ ID NO: 1524 - DNA, 25 bp, synthetic construct
  source 1..25: mol_type = other DNA
gacacgtcttcatcgttatgatcaa

SEQ ID NO: 1525 - DNA, 23 bp, synthetic construct
  source 1..23: mol_type = other DNA
agagatttcacaacaaaacatct

SEQ ID NO: 1526 - DNA, 23 bp, synthetic construct
  source 1..23: mol_type = other DNA
aatctagtttagcaagttgaaga

SEQ ID NO: 1527 - DNA, 59 bp, synthetic construct
  source 1..59: mol_type = other DNA
  misc_difference 26..40: note = This region may encompass 3-15 nucleotides or may be absent
caaagcatgctccactaatttcacctttttttttttttttatgatgacgaggcaaggta

SEQ ID NO: 1528 - DNA, 65 bp, synthetic construct
  source 1..65: mol_type = other DNA
  misc_difference 26..40: note = This region may encompass 3-15 nucleotides or may be absent
agtgcattggagaatgaaaaggttgttttttttttttttttgaattcatatgatgatgatgagac

SEQ ID NO: 1529 - DNA, 19 bp, synthetic construct
  source 1..19: mol_type = other DNA
atgatgacgaggcaaggta

SEQ ID NO: 1530 - DNA, 25 bp, synthetic construct
  source 1..25: mol_type = other DNA
caaagcatgctccactaatttcacc

SEQ ID NO: 1531 - DNA, 25 bp, synthetic construct
  source 1..25: mol_type = other DNA
tgaattcatatgatgatgatgagac

SEQ ID NO: 1532 - DNA, 25 bp, synthetic construct
  source 1..25: mol_type = other DNA
agtgcattggagaatgaaaaggttg

SEQ ID NO: 1533 - DNA, 25 bp, synthetic construct
  source 1..25: mol_type = other DNA
gaggcaaggtggtttattgatatgt

SEQ ID NO: 1534 - DNA, 22 bp, synthetic construct
  source 1..22: mol_type = other DNA
aaacaatacttgatgatgacga

SEQ ID NO: 1535 - DNA, 64 bp, synthetic construct
  source 1..64: mol_type = other DNA
  misc_difference 26..40: note = This region may encompass 3-15 nucleotides or may be absent
caaagcatgctccactaatttcacctttttttttttttttggcaaggtaaaactatatctgttg

SEQ ID NO: 1536 - DNA, 24 bp, synthetic construct
  source 1..24: mol_type = other DNA
ggcaaggtaaaactatatctgttg

SEQ ID NO: 1537 - DNA, 23 bp, synthetic construct
  source 1..23: mol_type = other DNA
tggttactaatatggtcactgaa

SEQ ID NO: 1538 - DNA, 23 bp, synthetic construct
  source 1..23: mol_type = other DNA
acgtaatatacgagagatgaaga

SEQ ID NO: 1539 - DNA, 61 bp, synthetic construct
  source 1..61: mol_type = other DNA
  misc_difference 24..38: note = This region may encompass 3-15 nucleotides or may be absent
agtcggcattgattatcatgtcctttttttttttttttattatatgttccctttcaaggat

SEQ ID NO: 1540 - DNA, 60 bp, synthetic construct
  source 1..60: mol_type = other DNA
  misc_difference 21..35: note = This region may encompass 3-15 nucleotides or may be absent
gcacagcgttgaccaagttctttttttttttttttcgtaatgaacagtattattttggct

SEQ ID NO: 1541 - DNA, 23 bp, synthetic construct
  source 1..23: mol_type = other DNA
attatatgttccctttcaaggat

SEQ ID NO: 1542 - DNA, 23 bp, synthetic construct
  source 1..23: mol_type = other DNA
agtcggcattgattatcatgtcc

SEQ ID NO: 1543 - DNA, 25 bp, synthetic construct
  source 1..25: mol_type = other DNA
cgtaatgaacagtattattttggct

SEQ ID NO: 1544 - DNA, 20 bp, synthetic construct
  source 1..20: mol_type = other DNA
gcacagcgttgaccaagttc

SEQ ID NO: 1545 - DNA, 18 bp, synthetic construct
  source 1..18: mol_type = other DNA
atgggcatgatgggtctt

SEQ ID NO: 1546 - DNA, 19 bp, synthetic construct
  source 1..19: mol_type = other DNA
aaccatcctagcagcatta

SEQ ID NO: 1547 - DNA, 57 bp, synthetic construct
  source 1..57: mol_type = other DNA
  misc_difference 22..36: note = This region may encompass 3-15 nucleotides or may be absent
aatcacttgctcccttgcttctttttttttttttttttgagtgctacatgaaaagac

SEQ ID NO: 1548 - DNA, 58 bp, synthetic construct
  source 1..58: mol_type = other DNA
  misc_difference 26..40: note = This region may encompass 3-15 nucleotides or may be absent
atgattaaaaatgagtgggaacgccttttttttttttttttttctgaagcacatggga

SEQ ID NO: 1549 - DNA, 21 bp, synthetic construct
  source 1..21: mol_type = other DNA
ttgagtgctacatgaaaagac

SEQ ID NO: 1550 - DNA, 21 bp, synthetic construct
  source 1..21: mol_type = other DNA
aatcacttgctcccttgcttc

SEQ ID NO: 1551 - DNA, 18 bp, synthetic construct
  source 1..18: mol_type = other DNA
tttctgaagcacatggga

SEQ ID NO: 1552 - DNA, 25 bp, synthetic construct
  source 1..25: mol_type = other DNA
atgattaaaaatgagtgggaacgcc

SEQ ID NO: 1553 - DNA, 21 bp, synthetic construct
  source 1..21: mol_type = other DNA
actgctcttcatttcaaactc

SEQ ID NO: 1554 - DNA, 21 bp, synthetic construct
  source 1..21: mol_type = other DNA
gttgtgaaatctcttgcttca

SEQ ID NO: 1555 - DNA, 63 bp, synthetic construct
  source 1..63: mol_type = other DNA
  misc_difference 26..40: note = This region may encompass 3-15 nucleotides or may be absent
tccttgaactcatttttctcgtctttttttttttttttttcttagacaatatggattcagtcc

SEQ ID NO: 1556 - DNA, 60 bp, synthetic construct
  source 1..60: mol_type = other DNA
  misc_difference 25..39: note = This region may encompass 3-15 nucleotides or may be absent
aagtaaggatgtgaaaggaatggttttttttttttttttctaatatgggttcacccctaa

SEQ ID NO: 1557 - DNA, 23 bp, synthetic construct
  source 1..23: mol_type = other DNA
cttagacaatatggattcagtcc

SEQ ID NO: 1558 - DNA, 25 bp, synthetic construct
  source 1..25: mol_type = other DNA
tccttgaactcatttttctcgtctt

SEQ ID NO: 1559 - DNA, 21 bp, synthetic construct
  source 1..21: mol_type = other DNA
ctaatatgggttcacccctaa

SEQ ID NO: 1560 - DNA, 24 bp, synthetic construct
  source 1..24: mol_type = other DNA
aagtaaggatgtgaaaggaatggt

SEQ ID NO: 1561 - DNA, 23 bp, synthetic construct
  source 1..23: mol_type = other DNA
tgatatgtatgctgaaaggaatt

SEQ ID NO: 1562 - DNA, 20 bp, synthetic construct
  source 1..20: mol_type = other DNA
tgcctcatattttagtgcca

SEQ ID NO: 1563 - DNA, 62 bp, synthetic construct
  source 1..62: mol_type = other DNA
  misc_difference 26..40: note = This region may encompass 3-15 nucleotides or may be absent
agctctttttggtatgctgactgaatttttttttttttttatccaacttttcttgactttgc

SEQ ID NO: 1564 - DNA, 55 bp, synthetic construct
  source 1..55: mol_type = other DNA
  misc_difference 21..35: note = This region may encompass 3-15 nucleotides or may be absent
caaggtggtggagtggttctttttttttttttttttccactactctgtctctagc

SEQ ID NO: 1565 - DNA, 22 bp, synthetic construct
  source 1..22: mol_type = other DNA
atccaacttttcttgactttgc

SEQ ID NO: 1566 - DNA, 25 bp, synthetic construct
  source 1..25: mol_type = other DNA
agctctttttggtatgctgactgaa

SEQ ID NO: 1567 - DNA, 20 bp, synthetic construct
  source 1..20: mol_type = other DNA
tccactactctgtctctagc

SEQ ID NO: 1568 - DNA, 20 bp, synthetic construct
  source 1..20: mol_type = other DNA
caaggtggtggagtggttct

SEQ ID NO: 1569 - DNA, 18 bp, synthetic construct
  source 1..18: mol_type = other DNA
taggcgttggttgtgatc

SEQ ID NO: 1570 - DNA, 20 bp, synthetic construct
  source 1..20: mol_type = other DNA
acatgaaggaattaggaggc

SEQ ID NO: 1571 - DNA, 62 bp, synthetic construct
  source 1..62: mol_type = other DNA
  misc_difference 23..37: note = This region may encompass 3-15 nucleotides or may be absent
gtttccaccaccattcctcaaattttttttttttttttatacatcaaaggaactaatcttgc

SEQ ID NO: 1572 - DNA, 58 bp, synthetic construct
  source 1..58: mol_type = other DNA
  misc_difference 26..40: note = This region may encompass 3-15 nucleotides or may be absent
tcgaagtatgcattctttgttgaggtttttttttttttttagtgttgaagatgcacgt

SEQ ID NO: 1573 - DNA, 25 bp, synthetic construct
  source 1..25: mol_type = other DNA
tatacatcaaaggaactaatcttgc

SEQ ID NO: 1574 - DNA, 22 bp, synthetic construct
  source 1..22: mol_type = other DNA
gtttccaccaccattcctcaaa

SEQ ID NO: 1575 - DNA, 18 bp, synthetic construct
  source 1..18: mol_type = other DNA
agtgttgaagatgcacgt

SEQ ID NO: 1576 - DNA, 25 bp, synthetic construct
  source 1..25: mol_type = other DNA
tcgaagtatgcattctttgttgagg

SEQ ID NO: 1577 - DNA, 25 bp, synthetic construct
  source 1..25: mol_type = other DNA
cttccatgcatctgaaatcttttcc

SEQ ID NO: 1578 - DNA, 21 bp, synthetic construct
  source 1..21: mol_type = other DNA
ttgatatgttcttccaagtgg

SEQ ID NO: 1579 - DNA, 18 bp, synthetic construct
  source 1..18: mol_type = other DNA
agatgcacgtgaggaaat

SEQ ID NO: 1580 - DNA, 57 bp, synthetic construct
  source 1..57: mol_type = other DNA
  misc_difference 25..39: note = This region may encompass 3-15 nucleotides or may be absent
gcttctctcaatctcgcaagattatttttttttttttttgtaggcgttggttgtgat

SEQ ID NO: 1581 - DNA, 56 bp, synthetic construct
  source 1..56: mol_type = other DNA
  misc_difference 21..35: note = This region may encompass 3-15 nucleotides or may be absent
ggaatggtggtggaaacgcttttttttttttttttaaaagatttcagatgcatgga

SEQ ID NO: 1582 - DNA, 18 bp, synthetic construct
  source 1..18: mol_type = other DNA
gtaggcgttggttgtgat

SEQ ID NO: 1583 - DNA, 24 bp, synthetic construct
  source 1..24: mol_type = other DNA
gcttctctcaatctcgcaagatta

SEQ ID NO: 1584 - DNA, 21 bp, synthetic construct
  source 1..21: mol_type = other DNA
aaaagatttcagatgcatgga

SEQ ID NO: 1585 - DNA, 20 bp, synthetic construct
  source 1..20: mol_type = other DNA
ggaatggtggtggaaacgct

SEQ ID NO: 1586 - DNA, 22 bp, synthetic construct
  source 1..22: mol_type = other DNA
tttcaacaagtacaaggacaat

SEQ ID NO: 1587 - DNA, 22 bp, synthetic construct
  source 1..22: mol_type = other DNA
gcctgatattgatcataacgat

SEQ ID NO: 1588 - DNA, 58 bp, synthetic construct
  source 1..58: mol_type = other DNA
  misc_difference 24..38: note = This region may encompass 3-15 nucleotides or may be absent
tgggaggcttcatataagctcagtttttttttttttttttgtttcgacacaaggctaa

SEQ ID NO: 1589 - DNA, 58 bp, synthetic construct
  source 1..58: mol_type = other DNA
  misc_difference 26..40: note = This region may encompass 3-15 nucleotides or may be absent
agggagaaaatatccttgatgaagctttttttttttttttgaagacgtgtcatggacg

SEQ ID NO: 1590 - DNA, 20 bp, synthetic construct
  source 1..20: mol_type = other DNA
ttgtttcgacacaaggctaa

SEQ ID NO: 1591 - DNA, 23 bp, synthetic construct
  source 1..23: mol_type = other DNA
tgggaggcttcatataagctcag

SEQ ID NO: 1592 - DNA, 18 bp, synthetic construct
  source 1..18: mol_type = other DNA
gaagacgtgtcatggacg

SEQ ID NO: 1593 - DNA, 25 bp, synthetic construct
  source 1..25: mol_type = other DNA
agggagaaaatatccttgatgaagc

SEQ ID NO: 1594 - DNA, 25 bp, synthetic construct
  source 1..25: mol_type = other DNA
gctttatttagtgctcaacacttgg

SEQ ID NO: 1595 - DNA, 23 bp, synthetic construct
  source 1..23: mol_type = other DNA
ctttcgagaagctatatcattca

SEQ ID NO: 1596 - DNA, 23 bp, synthetic construct
  source 1..23: mol_type = other DNA
gttgaaccaaaaatatttcccaa

SEQ ID NO: 1597 - DNA, 58 bp, synthetic construct
  source 1..58: mol_type = other DNA
  misc_difference 24..38: note = This region may encompass 3-15 nucleotides or may be absent
ctcttcaatggctctccaatgacttttttttttttttttgtgtctagaaaggagagtg

SEQ ID NO: 1598 - DNA, 59 bp, synthetic construct
  source 1..59: mol_type = other DNA
  misc_difference 25..39: note = This region may encompass 3-15 nucleotides or may be absent
atccattccaacaaaacttgtggctttttttttttttttgcttggatgagcatttgaga

SEQ ID NO: 1599 - DNA, 20 bp, synthetic construct
  source 1..20: mol_type = other DNA
tgtgtctagaaaggagagtg

SEQ ID NO: 1600 - DNA, 23 bp, synthetic construct
  source 1..23: mol_type = other DNA
ctcttcaatggctctccaatgac

SEQ ID NO: 1601 - DNA, 20 bp, synthetic construct
  source 1..20: mol_type = other DNA
gcttggatgagcatttgaga

SEQ ID NO: 1602 - DNA, 24 bp, synthetic construct
  source 1..24: mol_type = other DNA
atccattccaacaaaacttgtggc

SEQ ID NO: 1603 - DNA, 20 bp, synthetic construct
  source 1..20: mol_type = other DNA
gcagtaacaagcatggaatt

SEQ ID NO: 1604 - DNA, 20 bp, synthetic construct
  source 1..20: mol_type = other DNA
tccaatacagtggaacttcc

SEQ ID NO: 1605 - DNA, 61 bp, synthetic construct
  source 1..61: mol_type = other DNA
  misc_difference 25..39: note = This region may encompass 3-15 nucleotides or may be absent
ctcttggcttcctccaaaacatttttttttttttttttttgagtttgtatgaagcttcaca

SEQ ID NO: 1606 - DNA, 56 bp, synthetic construct
  source 1..56: mol_type = other DNA
  misc_difference 21..35: note = This region may encompass 3-15 nucleotides or may be absent
ttcaccaccaaaaggctgagttttttttttttttttgattgtttcacttgcttacc

SEQ ID NO: 1607 - DNA, 22 bp, synthetic construct
  source 1..22: mol_type = other DNA
tgagtttgtatgaagcttcaca

SEQ ID NO: 1608 - DNA, 24 bp, synthetic construct
  source 1..24: mol_type = other DNA
ctcttggcttcctccaaaacattt

SEQ ID NO: 1609 - DNA, 21 bp, synthetic construct
  source 1..21: mol_type = other DNA
tgattgtttcacttgcttacc

SEQ ID NO: 1610 - DNA, 20 bp, synthetic construct
  source 1..20: mol_type = other DNA
ttcaccaccaaaaggctgag

SEQ ID NO: 1611 - DNA, 25 bp, synthetic construct
  source 1..25: mol_type = other DNA
tctcagctgggaaaatggatactac

SEQ ID NO: 1612 - DNA, 20 bp, synthetic construct
  source 1..20: mol_type = other DNA
gcctgaagaaaatgttttgg

SEQ ID NO: 1613 - DNA, 21 bp, synthetic construct
  source 1..21: mol_type = other DNA
caaagtcacactctttgtctc

SEQ ID NO: 1614 - DNA, 58 bp, synthetic construct
  source 1..58: mol_type = other DNA
  misc_difference 25..39: note = This region may encompass 3-15 nucleotides or may be absent
agtagtatccattttcccagctgatttttttttttttttggaagccaagagtttcacc

SEQ ID NO: 1615 - DNA, 62 bp, synthetic construct
  source 1..62: mol_type = other DNA
  misc_difference 25..39: note = This region may encompass 3-15 nucleotides or may be absent
gaaacaatcactggaagttccacttttttttttttttttatccatttggtagagatcaatga

SEQ ID NO: 1616 - DNA, 19 bp, synthetic construct
  source 1..19: mol_type = other DNA
ggaagccaagagtttcacc

SEQ ID NO: 1617 - DNA, 24 bp, synthetic construct
  source 1..24: mol_type = other DNA
agtagtatccattttcccagctga

SEQ ID NO: 1618 - DNA, 23 bp, synthetic construct
  source 1..23: mol_type = other DNA
atccatttggtagagatcaatga

SEQ ID NO: 1619 - DNA, 24 bp, synthetic construct
  source 1..24: mol_type = other DNA
gaaacaatcactggaagttccact

SEQ ID NO: 1620 - DNA, 23 bp, synthetic construct
  source 1..23: mol_type = other DNA
ggaggatgccaagatctgaagct

SEQ ID NO: 1621 - DNA, 22 bp, synthetic construct
  source 1..22: mol_type = other DNA
gtgggtagatatgtgtagatgt

SEQ ID NO: 1622 - DNA, 23 bp, synthetic construct
  source 1..23: mol_type = other DNA
ttattatggaactgtgacgaatt

SEQ ID NO: 1623 - DNA, 62 bp, synthetic construct
  source 1..62: mol_type = other DNA
  misc_difference 25..39: note = This region may encompass 3-15 nucleotides or may be absent
tcccactgaaatccaaccattttcttttttttttttttttctacaagaagcaaaatggtact

SEQ ID NO: 1624 - DNA, 63 bp, synthetic construct
  source 1..63: mol_type = other DNA
  misc_difference 24..38: note = This region may encompass 3-15 nucleotides or may be absent
accagtccttattgtgcatgctttttttttttttttttgataataaccatgttccaaacattc

SEQ ID NO: 1625 - DNA, 23 bp, synthetic construct
  source 1..23: mol_type = other DNA
tctacaagaagcaaaatggtact

SEQ ID NO: 1626 - DNA, 24 bp, synthetic construct
  source 1..24: mol_type = other DNA
tcccactgaaatccaaccattttc

SEQ ID NO: 1627 - DNA, 25 bp, synthetic construct
  source 1..25: mol_type = other DNA
gataataaccatgttccaaacattc

SEQ ID NO: 1628 - DNA, 23 bp, synthetic construct
  source 1..23: mol_type = other DNA
accagtccttattgtgcatgctt

SEQ ID NO: 1629 - DNA, 25 bp, synthetic construct
  source 1..25: mol_type = other DNA
tcttccaatgttggtgtgtatccac

SEQ ID NO: 1630 - DNA, 23 bp, synthetic construct
  source 1..23: mol_type = other DNA
tgtgtagatgttttctacaagaa

SEQ ID NO: 1631 - DNA, 62 bp, synthetic construct
  source 1..62: mol_type = other DNA
  misc_difference 25..39: note = This region may encompass 3-15 nucleotides or may be absent
tcccactgaaatccaaccattttctttttttttttttttcaaaatggtactacagtggatac

SEQ ID NO: 1632 - DNA, 23 bp, synthetic construct
  source 1..23: mol_type = other DNA
caaaatggtactacagtggatac

SEQ ID NO: 1633 - DNA, 21 bp, synthetic construct
  source 1..21: mol_type = other DNA
gaggaattgaaaagaggtgat

SEQ ID NO: 1634 - DNA, 22 bp, synthetic construct
  source 1..22: mol_type = other DNA
ccatcttagcaaagtttgtagc

SEQ ID NO: 1635 - DNA, 58 bp, synthetic construct
  source 1..58: mol_type = other DNA
  misc_difference 24..38: note = This region may encompass 3-15 nucleotides or may be absent
gttcacgagcttcttcttcagattttttttttttttttctccgacatcaattcaatgt

SEQ ID NO: 1636 - DNA, 60 bp, synthetic construct
  source 1..60: mol_type = other DNA
  misc_difference 24..38: note = This region may encompass 3-15 nucleotides or may be absent
aatgaagcatggaaggagatgaatttttttttttttttatcttcagtcaatgagattgga

SEQ ID NO: 1637 - DNA, 20 bp, synthetic construct
  source 1..20: mol_type = other DNA
ctccgacatcaattcaatgt

SEQ ID NO: 1638 - DNA, 23 bp, synthetic construct
  source 1..23: mol_type = other DNA
gttcacgagcttcttcttcagat

SEQ ID NO: 1639 - DNA, 22 bp, synthetic construct
  source 1..22: mol_type = other DNA
atcttcagtcaatgagattgga

SEQ ID NO: 1640 - DNA, 23 bp, synthetic construct
  source 1..23: mol_type = other DNA
aatgaagcatggaaggagatgaa

SEQ ID NO: 1641 - DNA, 21 bp, synthetic construct
  source 1..21: mol_type = other DNA
ggaggttattttgaagaagct

SEQ ID NO: 1642 - DNA, 23 bp, synthetic construct
  source 1..23: mol_type = other DNA
ccaatatcatccatgaacctaga

SEQ ID NO: 1643 - DNA, 64 bp, synthetic construct
  source 1..64: mol_type = other DNA
  misc_difference 26..40: note = This region may encompass 3-15 nucleotides or may be absent
tcaacaaaacgttaccagaagaaactttttttttttttttgatggttgaatgaaggatatttcc

SEQ ID NO: 1644 - DNA, 61 bp, synthetic construct
  source 1..61: mol_type = other DNA
  misc_difference 24..38: note = This region may encompass 3-15 nucleotides or may be absent
tagccacaagttttgtagggatgttttttttttttttttgaaacaattttagggtctttcg

SEQ ID NO: 1645 - DNA, 24 bp, synthetic construct
  source 1..24: mol_type = other DNA
gatggttgaatgaaggatatttcc

SEQ ID NO: 1646 - DNA, 25 bp, synthetic construct
  source 1..25: mol_type = other DNA
tcaacaaaacgttaccagaagaaac

SEQ ID NO: 1647 - DNA, 23 bp, synthetic construct
  source 1..23: mol_type = other DNA
tgaaacaattttagggtctttcg

SEQ ID NO: 1648 - DNA, 23 bp, synthetic construct
  source 1..23: mol_type = other DNA
tagccacaagttttgtagggatg

SEQ ID NO: 1649 - DNA, 24 bp, synthetic construct
  source 1..24: mol_type = other DNA
taagagactctcaaatgctcatcg

SEQ ID NO: 1650 - DNA, 24 bp, synthetic construct
  source 1..24: mol_type = other DNA
cacatgaaactctagattggctct

SEQ ID NO: 1651 - DNA, 1722 bp, Cannabis sativa
  source 1..1722: mol_type = genomic DNA
atgtcactatcaggactaatctccactactactttcaaagaacaaccagcaatagtccgtcgatcaggaaactacaaacccccattgtgggatgctcattttatccaatcactccaagtcatatatacggaggaaagctatgggaaaagaatcaatgagctgaaagaagatgtgagaagaattcttgagaaggaggctgaaaatcctttagttaagcttgaacagattaatgatttgagcagacttggaatatcttatcactttgaagatcaaattaaggcaatattaaaccttacatataataataataatgcattgtggaagaaagataatctgtatgccactgctcttcatttcaaactccttagacaatatggattcaatcctgtatcttcagagattttcaatgctttcaaagacgagaaaaaggagttcaaggagagtttgagtaaagatgtgaaaggaatggtatgtctatatgaggcttcattctattcatttaggggtgaacccatattagatgaagcaagagatttcacaaccaaacatctcaaacaatacttgatgatgacgaggcaaggtcaaaatgttgaccatgatgatgataatgatttaatggtgaaattagtggagcatgctttggagcttccagtgcattggagaatgaaaaggttggaggcaaggtggtttattgatatgtatgctgaaatgtctcatcatcatcatatgaattcaacttttcttcaacttgctaaactagattttaacgttgtacaatcaacataccaagaagaccttaaacatgttgtaaggtggtggaaaactactagtctaggagagaggttaccctttgcaagagataggatagttgaaattttcttatggagtgtgggacttaaatttgagccacagtttagatattgccgaaaaatgctcacaaagattggtcaattggtaacgacaatggacgatatatttgacgtgtatggtacgcttgatgagctaagcctctttcaacacgcattgggaaggtgggatataaatacgatcgaccaacttccagattacatgaagatattttttttggctacttataatgtggtgaatgaaatggcgtatgacgtgctaaaacaaaatggcattctcattatcaaatatttaaagaaaacgtggacggatttatgtaaatgttacatgttggaggcaaattggtatcatagtggatacacaccaagcttggaagaatacattaaaaatggatggatatcaattgcagaacccttaattctagtcaatctttattgccttataaccaatccaataaaagaagatgacatagactgcttgcttcaatatcccacctttattcgtatctcaggaatcattgctcgacttgttgatgatttaggaacttcatcggatgaactgaaaagaggagacaatcctaaatcgattcaatgctatatgaaagaaaatggtatttgtgatgaaaagaatggccgtgaacacataaggaatttaatcagtgaaacatggaaggaaatgaatgaagctcgagtgggtgagtctccattttctcaagcttttattgaaactgccatagatttcgttaggacagcaatgatgatataccaaaaggagcaagatggggttggtactaattttgatcattacacaaaagatggaatcatttccttgttcttcacttccattcccatttga

SEQ ID NO: 1652 - DNA, 1665 bp, Cannabis sativa
  source 1..1665: mol_type = genomic DNA
atggcgttgtcaataatgtcttcttacgcatcttttcgtccctttaaaccctcctcatcactttcgagttctcaaaacataattagaaattttgacgagaactccaaatatcatatcaggagtaacggtgatctcacaccacaaaaggatttagataaatacagggacgttttaagaaaagcagacccatttgatgaaggtctgaagatgattgatgctattcaacggctaggaattgactatatcttcgaggaagagattgataaaattatacaaagccagtctgcttataagttttttagagaattcgagcatgatcatcatcatcatcaagatctgtatgatgtagctcttcgttttcgactcttgagacaacacggtcacttcgttcctgctgatattttcaacaagtacaaggacaataataagggttgtttcgacacaaggctaagagaggacatcaagggtttgctgagcttatatgaagcctcccatctatgcatagagggagaaaatatccttgatgaagctgctttatttagtgctcaacacttggaagcgtccatgacacgtcttcatcgttatgatcaatatcaggccaaatatgtggcaactacacttcaaaatcccactcacaaaagtttatccaagttcacagccaaggacctttttggtgtctatcccagtgagaatgggtacataaatttgtttcaacaactagcaaaagttgaatttaatagagttcagtccctgcatagaatggaaattgataaagtcaccagatggtggcgagacattggtttagctaaggaattaactttcgcaagagatcaaccggtgaagtggtatatttggtccatggcctgcctaaccgatccaatcttgtcgaaacaaagggttgcgcttacaaaatccatttcgtttatctatgtaatagatgatattttcgacatgtacagttcacttgatgaactcattctcttcacccaggctgtctctagctgggaatatagtgctatagaaaaacttccagactccatgaagacatgctttaaagccctagataatatgatcaatgagtctagccatacgatctatcaaaagcgtggatggagccctttacactctcttcggaagacgtgggcaagtttgtgcgaagcctttttagtagaggcaaaatggtttgcatcaaggcacgtaccaaaggcaaaagaatacttggaaaatggtgtggtcagctcaggagtgcacgtagttctggttcatatatttgttctcttggatgaaaccagtctcacccaaaagacactggattttgtggaaaacatgccttccatcattacttctacagcatcgattcttaggctttgggatgactttggtagtgccaaggatgagaatcaagaaggacatgacggatcttatgtggagtgttacatgaaggaattaggaggcagtgttgaagatgcacgtgaggaaatgatggaaaagatttcagatgcatggaagtgcctcaacaaagaatgcatacttcgaaatccagcgtttccaccaccattcctcaaagcttctctcaatctcgcaagattagttcctttgatgtataattatgatcacaaccaacgcctaccccacttggaagaacatatcaaatctttgttatag

SEQ ID NO: 1653 - DNA, 1665 bp, Cannabis sativa
  source 1..1665: mol_type = genomic DNA
atggcgttgtcaataatgtcttcttacgcatcttttcgtccctttaaaccctcctcatcactttcgagttctcaaaacataattagaaattttgacgagaactccaaatatcatatcaggagtaacggtgatctcacaccacaaaaggatttagataaatacagggacgttttaagaaaagcagacccatttgatgaaggtctgaagatgattgatgctattcaacggctaggaattgactatatcttcgaggaagagattgataaaattatacaaagccagtctgcttataagttttttagagaattcgagcatgatcatcatcatcatcaagatctgtatgatgtagctcttcgttttcgactcttgagacaacacggtctcttcgttcctgctgatattttcaacaagtacaaggacaataataagggttgtttcgacacaaggctaagagaggacatcaagggtttgctgagcttatatgaagcctcccatctatgcatagagggagaaaatatccttgatgaagctgctttatttagtgctcaacacttggaagcgtccatgacacgtcttcatcgttatgatcaatatcaggccaaatttgtggcaactacacttcaaaatcccactcacaaaagtttatccaagttcacagccaaggacctttttggtgtctatcccagtgagaatgggtacataaatttgtttcaacaactagcaaaagttgaatttaatagagttcagtccctgcatagaatggaaattgataaagtcaccagatggtggcgagacattggtttagctaaggaattaactttcgcaagagatcaaccggtgaagtggtatatttggtccatggcctgcctaaccgatccaatcttgtcgaaacaaagggttgcgcttacaaaatccatttcgtttatctatgtaatagatgatattttcgacatgtacagttcacttgatgaactcattctcttcacccaggctgtctctagctgggaatatagtgctatacaaaaacttccagactccatgaagacatgctttagagccctagataatatgatcaatgagtctagccatacgatctatcaaaagcgtggatggagccctttacactctcttcggaagacgtgggcaagtttgtgcgaagcctttttagtagaggcaaaatggtttgcatcaaggcacgtaccaaaggcaaaagaatacttggaaaatggtgtggtcagctcaggagtgcacgtagttctggttcatatatttgttctcttggatgaaaccagtctcacccaaaagacactggattttgtggaaaacatgccttccatcattacttctacagcatcgattcttaggctttgggatgactttggtagtgccaaggatgagaatcaagaaggacatgacggatcttatgtggagtgttacatgaaggaattaggaggcagtgttgaagatgcacgtgaggaaatgatggaaaagatttcagatgcatggaagtgcctcaacaaagaatgcatacttcgaaatccagcgtttccaccaccattcctcaaagcttctctcaatctcgcaagattagttcctttgatgtataattatgatcacaaccaacgcctaccccacttggaagaacatatcaaatctttgttatag

SEQ ID NO: 1654 - DNA, 1920 bp, Cannabis sativa
  source 1..1920: mol_type = genomic DNA
atgcagtgcatggcttttcaccaatttgctccatcatcatccctccctatttggagtagtattaataatcgttttacaccaaaaacttctattacttctatttcaaaaccaaaaccaaaactaaaaccaaaatcaaacttgaaatcgagatcgagatcaagtacttgctaccccatacaatgtactgtggtcgataaccctagttctacgattactaataatagtgatcgaagatcggccaactatggacctcccatttggtcttttgatttcattcaatctctttcaactcaatataagggtgaactttatacaagtcgattaaataagctggagaaagacgtgaaaaggatactggttggagaggaaaattgtttagctcaacttgagctaattgatacaatacaaagacttggattatcttatcgttttgagaatgaaatcatttctattttgaaagaaaaattcaccaataataataacaaccctaattatgatttgtatgctactgctctccaatttaggcttctacgccaatatggatttgaagtacctcaagaaattttcaataatttcaaagatcagaagacaggagagttcaaggcaaatataagtaatgatattatgggagcattaggcttatatgaagcttcattctatgggaaaaagggtgaaagtattttggatgaagcaagaattttcacaacaaaatgtctcaaaaattacatagagaaaaacaaattattagatgatgataataatattattgcattatttgttaaccatgctttggagactccacttcattggagaataaataggttggaagctaggtggttcattgagatgtaccagaagaaaaaagacatgaatttcacattacttgaatttgccaaattggattttaacatgctccaatcaatacaccaagaagatctaaaacatctatcaagatggtgggagcaatctaaacttggagaaaagaaaatggaaaattatgttagagatagattggtggaggcttttttatggcagattggagtaaaatttgagccacaattcagtcaatttagaagaatatctgcaagattatatgttctaattacagtaattgatgacatatatgatgtgtatggaacattggaggaattagagcttttcacaaaagctattgaaagatgggatgtgaaagccataaatgagttaccagaatatatgagaatgcctttctttttcttattcaatactgtgaatgaaatggggtatgataccttaacagacaaaaatttcatcaacattgaatacctcaagaaatcgtgggtggtttggtctaaatatcaattagaagaggcaaaatggttctatagtggatacaaaccaacattagaagaatatatgaagaatacatggatttcagttggtggaccaattattcttttgcatgcttattttgctttcacaaatcccttagaaaaagcttccataaaattcttggaagaaggttatgatgatccttccataaatattcatgaaggatccctggaaatatcaaatgatggttaccctaccatatttcatcttggatccatacttttacgacttgaagatgacctaggaacatcgtcggatgagatgaaaagaggagatgttccgaaatcaattcaatgttacatgagcgatacaggtgtttctgaagatgaagctcgcgagcacatcaaatttttgataatggaaacatggaaagagatgaataaagaaatggacttcaataattatttctcgaaagaagttgttcatgtttgcaaaaatcttggtagaacagccaaatttatatacctttatggtgatggacatgcttctcagaataatttatcaaagggacatatttcagatttgattattaaccctattcccatgtaa

SEQ ID NO: 1655 - DNA, 1842 bp, Cannabis sativa
  source 1..1842: mol_type = genomic DNA
atgtcatcgattatttattccccgtttacttctctacttccactaaagccaatatcatcagcatcatcaacagcaacaattaatacaagattaaaatcccgattccgatcatcaatactagtagtactacgaccccagcaaagacgctcagctaaataccatcctacagtttgggaaaataagcatatcgactctttctttactccctacaactatgagttacactctgaacgactacaagagttgaagcaaattacgagtacttcacttagaaccacaaaagacccttgtattctcttgaagcttattgattctatccaaaggttgggactcgaatatcacttcgaaaatgagattgaagatgctgtttctttcatttacgcacataatgatcaaactactagtaatgatctcttcatgacagcacttagatttcgtattcttaggcaacatggcttatttgttggctcagatgtgtttgacagatttagaggcagagatgggaaattcttggacagcttaagcagtaacaagcatggaattttgagtttgtatgaagcttcacaccttggaatgcctgaagaaaatgttttggaggaagccaagagtttcaccaccaaaaggctgagatatttctcagctgggaaaatggatactactttgtttggtaagcaagtgaaacaatcactggaagttccactgtattggaggatgccaagatctgaagctaggaatttcattgatctctaccaaatggatgagacaaagagtgtgactttgcttgagttggctaagttggattataatctggtccaatctgtgcatcaaaatgagcttaaggagttgggaaggtggtgggatgatttgggattcaagaaaaatctaccttttgcaagagatcgtgtggtggagaactatttgtgggccatgggaatcgtatctgagccacagttctccaaatgcaggataggcttaaccaagttcgtttgcatattaacagcaatagatgatgtttatgacatatatggatcattagatgagcttgaacttttcacaaatgcagtagaaagctgggacataagggcaataagggatgaatttcctctttatttgaaaacatgctatcttggcatgcttaattttggtaatgaagtgatcgatgatgttcttcaaaaccatggcttgaatatttcctcctacattaaagaagagtggttaaatctctgcaaatcatatcttgtagaagcaaggtggttttataatgattatacaccaagtttgaatgaatacttggaaaattcatctacttcagttggtggtcatgcagctatagttcatgcttgtattttactcttagatggctccatacccgaaaccttactggattacaatttcaaccattttcactctaagctgatttattggtcatctcttataacaaggcttagtgatgatttaggaacttcaaaggatgagcttaaaagaggagatgtgaagaaatcagtggagtgctacatggcagagaaaggaatatgggaagaagaagaagcaataaatcacataaaagaattgagaagaaattcatggaaaatggtgaacaaggagataataattgggaataattgcttgccaaaaataatggtgaagatgtgcttgaacatggcaagaactgctcaattcatattccaacatggtgatggaattggcacatcaactggggccaccaaacatcgtttagcctcattgattgtcaaacctgtacccatcatcgatccatgttccaaaccaattaatggacttggagactcacatacaaccataaaaactaaaataaaaaaataa

SEQ ID NO: 1656 - DNA, 1716 bp, Cannabis sativa
  source 1..1716: mol_type = genomic DNA
atggattgcatatcaggcaaaatccctagtgatagttctgttactaatattgttcgaagatcagccaactttgaaccatccatttggtcttttgatttcattcagtctctttcaagcaaatataagggagaaccttatataagtcgagtaaaaaagctcgaggaagatgtgaaaaggatgctagttgagatggaaaactctttagctcaacttgaactcattgacacgttacaaagacttggagtatcttatcgttttgagaatgaaataaatactattttaaaagaaaaatatgtcaatattaatggtaatattaataaccctaattataatttatatgccactgctcttgaatttaggcttctacgtcaacatggttatgctgtacctcaagagacttttaattattttaaggacgagacaggaaaattcaaaacaaacataagtggtgatatcatgggagtattggccttatatgaagcttcattctatgagaaaaaaggcgaaagcattttagaggaagctagaattttcacaactgaacgtctcaaaaactacacaataatgatatcagagcaaaagaaattgatgattaataataattatgattattattacaatattgaattagtgaatcatgctttggagctcccacttcatcgaaggaccacaagaatagaagctaagtggttcatcgatatgtacaagaaaaaacaagacatgaatcctattttgcttgagtttgccaaactcgatttcaacatgatacaatcaacacatcatgaagatttgaaacatatattcaggtggtggaggcatactaaacttggtgagaaattgaattttgcaagagatcgattgatggaatgttttttatggaaagttggaataagatttgagccaaaattcagttattttagaacaacaactgtcaaattacttgagctaataacattaattgatgatatatatgatgtttatggaacattagatgaattagagcttttcaccaaagctattgagagatgggatgtggaaatgataaatgaattaccagaatacatgaagatgccttatattgttttacacaatacaataaatgaaatggtatttgagatattaagagatcaacaaatcaccatcaaaattcaatacttaaagaaaacgtgggtagatatgtgtagatgttttctacaagaagcaaaatggtactacagtggatacacaccaacattggaagaatatattgaaaatggttggatttcagtgggagcaccagttcttattgtgcatgcttatttttctcattcaaataataataaagagatttttgaatgcttggaacatggttattatcctaccataattcgtcacagtgccataataatacgacttacaaatgacctagcaacatcatctgaggaactgaaaagaggtgatgctccgacgtcaattcaatgttacatgcaagaaaaaaatatatgtgaagaggaatctcgtgaacatattaagtttttaataagtgaagcgtggaaggagatgaatatcagtgaatctgatgatggattaatatatccaatctcattgattgaagatgcgagaaactttgctaggataggattattcatgtatcaacatggtgatggtcacagttctcaggataatctatccaaagaaagaatttcatcctttattattaaacctattcccctatag

SEQ ID NO: 1657 - DNA, 1656 bp, Cannabis sativa
  source 1..1656: mol_type = genomic DNA
atgtcaaatattcaagtcttagcttcatctcaattaagtgacaaaattgtttctcgcccaacaacaaaatttcacccttctatttggggcgatcgattcctccattacaatatttcagaacaagacttggtttgcaaacaagaaagaattgaagaattaatacaagttgtgaagaaagagatattatcttcaaatcatgatcaattgaagttgattgacaacctccaacgtttgggattatcacatcattttgagagtgaaatcgagaaattattagaacaattaagtatcggcactcatcatcaaaataataatctacatgatgtttctctttggtttagactattaagacaaagtggatttaaggtttcatcaagcgtatttgaaaaattcaaagacgagaaaggtaactttaaagaaagcctaataactcatgttccaggtttgcttagcctgtacgaggcttcgcacttgagttatgttggagaaagcatactagatgaagcacttgctttcacaaccactcaccttaaggctattgtggcaaatagtaaagatcatccattatcacatcaaatatccatagccctgcataggcctctaagaaagaccatagagaggcttcatgctaggttttatatttcaatctatgaaaaggatgcctctcatgacaaagtattgttagagcttgcaaagttagattttaatctattacaatgtttccacaaaaaggagcttagtgaaattgtcaggtggtggaaggagcatgagtttgcaaagaaatttccttttgcaagagataggattgtggaactgtatttttggatattgggtgtatattatgaacccaaatactctcaagcaagaaagcttttaaccaaagtcattgcattgacctcaatcactgatgatatatatgatgcatatggtactattgatgagcttgagattcttacccaagcaatgcagaggtgggacataagttatatagataaacttgaaccagaatatttgaagacatattataaggcaatgttggattcttatgaagagtttgaaaaagagcttaaaaagaaagaaatatacaaacttgagtatgcaaaagaagagatgaaaagaatgattagagcttattttgaagaagctagatggttgaaccaaaaatatttcccaagcttggatgaacatttgagagtttcttatgttactaattgtggtaacattatgctgatagccacaagttttgttggaatggatgatattgtaacaaatcaaactcttcaatggctctccaatgaccctaaaattgtaaaagcttccactctcctttctagacacatgaatgatatagcttctcgaaagtttgagcaagagagaaaccacataccatcaacagtggaatgttacatgaagcaatacggggtatcagaagaagaggcagttgaagaactcaataaaagagttgtcaattactggaaagaaatcaatgaagattttattaggccgactgctgtgcctttacctatcttaattcgtgttcttaattttactaaggtagctgagcttatttacaaagagggtgatgatcaatatacacatgttggaaaagtattgaaaaaaagcattgctgctttacttatagacccaatcccataa

SEQ ID NO: 1658 - DNA, 1665 bp, Cannabis sativa
  source 1..1665: mol_type = genomic DNA
atggcgttgtcaataatgtcttcttacgcatcttttcgtccctttaaaccctcctcatcactttcgagttctcaaaacataattagaaattttgacgagaactccaaatatcatatcaggagtaacggtgatctcacaccacaaaaggatttagataaatacagggacgttttaagaaaagcagacccatttgatgaaggtctgaagatgattgatgctattcaacggctaggaattgactatatcttcgaggaagagattgataaaattatacaaagccagtctgcttataagttttttagagaattcgagcatgatcatcatcatcatcaagatctgtatgatgtagctcttcgttttcgactcttgagacaacacggtcacttcgttcctgctgatattttcaacaagtacaaggacaataataagggttgtttcgacacaaggctaagagaggacatcaagggtttgctgagcttatatgaagcctcccatctatgcatagagggagaaaatatccttgatgaagctgctttatttagtgctcaacacttggaagcgtccatgacacgtcttcatcgttatgatcaatatcaggccaaatatgtggcaactacacttcaaaatcccactcacaaaagtttatccaagttcacagccaaggacctttttggtgtctatcccagtcagaatgggtacataaatttgtttcaacaactagcaaaagttgaatttaatagagttcagtccctgcatagaatggaaattgataaagtcaccagatggtggcgagacattggtttagctaaggaattaactttcgcaagagatcaaccggtgaagtggtatatttggtccatggcctgcctaaccgatccaatcttgtcgaaacaaagggttgcgcttacaaaatccatttcgtttatctatgtaatagatgatattttcgacatgtacagttcacttgatgaactcattctcttcacccaggctgtctctagctgggaatatagtgctatacaaaaacttccagactccatgaagacatgctttagagccctagataatatgatcaatgagtctagccatactatctatcaaaagcgtggatggagccctttacactctcttcggaagacgtgggcaagtttgtgcgaagcctttttagtagaggcaaaatggtttgcatcaaggcacgtaccaaaggcaaaagaatacttggaaaatggtgtggtcagctcaggagtgcacgtagttctggttcatatatttgttctcttggatgaaaccagtctcacccaaaagacactggattttgtggaaaacatgccttccatcattacttctacagcatcgattcttaggctttgggatgactttggtagtgccaaggatgagaatcaagaaggacatgacggatcttatgtggagtgttacatgaaggaattaggaggcagtgttgaagatgcacgtgaggaaatgatggaaaagatttcagatgcatggaagtgcctcaacaaagaatgcatacttcgaaatccagcgtttccaccaccattcctcaaagcttctctcaatctcgcaagattagttcctttgatgtataattatgatcacaaccaacgcctaccccacttggaagaacatatcaaatctttgttatag

SEQ ID NO: 1659 - DNA, 1740 bp, Cannabis sativa
  source 1..1740: mol_type = genomic DNA
atgggagagcggccgccagatcttccggatggctcgagtttttcagcaagatatccaatattcaaagatcaaccagcagcaattgtccggcgatcaggcaactacaaacccacattgtgggatgctcattttttcaattcactccaagtcatatatacggaggaaagctatgggaaaagaatcaatgagctgaaagaagatgtgagaagaattcttgagaaggaggctgaaaatcctttagttaagcttgaacagatcaatgatttgagcagacttggaatatcttatcactttgaaaatcaaattaaaacaatattaaacctgacatttaacaataataatgcattgtggaagaaagataatctgtatgccactgctcttcatttcaaactccttagacaatatggattcagtcctgtatcttcagaggttttcaatgtcttcaaagacgagaaaaatgagttcaaggagaatttaagtaaggatgtgaaaggaatggtatgtctatatgaggcttcattctattcatttaggggtgaacccatattagatgaagcaagagatttcacaaccaaacatctcaaacaatacttgatgacgaggcaatgtcaaactaaatctgttgaccatgatgatgatgatgatcttgtgaaacttgtggagcatgccttggatcttccactccattggagattgccaagattggaggctaggtggtttattgatatgtatgctgaaaggaattatgatatgaatccaacttttcttgactttgctaaacttgactataacttcgttcagtcagcataccaaaaagagctcaaatatatttcaaggtggtggagtggttctagattgacagaaaggctaccatttgctagagacagagtagtggaaattttctattctgcagtggcactaaaatatgaggcagaatttgggtttgttagaactgtgatgacaaaaattggtctcttgctaacactcatggacgatatatatgatgtgtatggtacactagatgagcttcagctttttctagaggcaattgagaggtggaatataaatgaactggatcagctacccgattacatgaagatattgtttgttgctttttataacaatgtgaatgagatatcttattatgtcctcaaagaaaatgggattcacaccatcaaatatctaaagaaagcgttgggtgatctgtgtaaatgctatatggaggaggcaaaatggtttcacagtggacacataccaagtttagaagaattcattgagaatggatggaaatcaattacaatacctctttgtcttatctatcattattgcttaattacaacttcaattacagaacaagacatggaacacttgcttcaatatccaaccattttacgtgtctcaggaactgtttttcgatttatagatgacttgggaacctcatcagatgaacttgaaagaggagataatccttcatcaattcaatgctacatgcgtgaaaagggtgttagtgaaaatgaaagccgtgaacacatatggaatttaataagtgaaggatggaaagaaattaatgaagttaaagcttcaacctctccatactctcaagtgtttattgaatctgccattgattttgttagaggagcaatggagatgtaccacaagggtgatggttttggtactaatcaagatcggtatcttaagaccaaagttgtcaacatgttcttcgatccaattccaatttaa

SEQ ID NO: 1660 - DNA, 1656 bp, Cannabis sativa
  source 1..1656: mol_type = genomic DNA
atggcttctccctttctttatgtcccttctaaacacggcaatggattacaaagtttcacagatccgttttacatggagtatacacgtaatatacgagagatgaagaacgtaatgaacagtattattttggctgatgatgattatcgtgaacgctccatagaagctttgaacttggtcaacgctgtgcttagagtcggcattgattatcatgtccaagatgagattaaatctatccttgaaagggaacatataattttcagtgaccatattagtaaccaatattttaataatattaatcaagaccacctgtatgaggtttctcttcgtttccgattactgagacaaggaggttatgatgtctctccagatgtgtttaacgagttgatgaaggacaaaaagggaaatttcaatgttttagtggaagaagacagagagggactaagagaattgtttgaagcctcacaagtaagaatagaaggagaagaggtactagaggaagctgaagtgtttagtggcgaacacctaaaagaatgggcaaatcttcatcgtcatacgagtgaagctcgaagtattcaattaacgttagaccaaccttgtcataaaagcttggccagggtcacatctccaaactttttggacagtttctcagccaacactgctaccagagaccaaggctggacctggatgacccttttaaacaaactggtcacaatggacttcaaaatagttcagtctattcaccaaagggaaattgttcaagtctccaaatggtggaaagagcttggtttggcagaggagttgaaatttgctagagaccaacccctaaaatggtacctctggacagtggcaagtctaccagatccaagcttgtctgaagagaggattgaactaactaaacccatttctctcgtctacataatagatgatatttttgatgtttatgggacactagacgaactcactcttttcacagacgcagttaataattgggaaattaaagagcagttacccgactatttgaagatatgtttcaaggcacttgatgatataaccaacaaaattagctacgtggtgtacagaaaacatggatggaacccaattgactccttaagaaaatcgtggggaaaactgtgcaatgcgttcttgttagaagcagagtggtttggttgtgggaagttgccaaatgaagaggtgtatttgaagaacgcgattgtgagttctggtgtacacgtggtgctagttcatatgttctttctcttaggtgaaggtatatccatggaagctgtaaacttactggacaacattccaggccttgtgtcttctacagcagcaattcttcgtctttgggatgacttaggaagtgccaaggatgagaatcaaaatgggcatgatgggtcttacgttgagtgctacatgaaaagacacaaggagtgttcaatgggcgaagcaagggagcaagtgattcgtatgattaaaaatgagtgggaacgcctcaataaggagtgtttctcgccaaaacattttcccatgtgcttcagaaagggttgtcttaatgctgctaggatggttccagtgatgtatgactatgatgatcatcatcgccttccaggcctccagaattatatcaactcacttctctctcatcaaacaatataa

SEQ ID NO: 1661 - DNA, 1734 bp, Cannabis sativa
  source 1..1734: mol_type = genomic DNA
atgattacaggactaatctccactactactttcaaagaacaaccagcaatagtccgtcgatcaggaaactacaaacccccattgtgggatgctcattttatccaatcactccaagtcatatatacggaggaaagctatgggaaaagaatcaatgagctgaaagaagatgtgagaagaattcttgagaaggaggctgaaaatcctttagttaagcttgaacagattaatgatttgagcagacttggaatatcttatcactttgaagatcaaattaaggcaatattaaacctgacatataataataataatgcattgtggaagaaagataatctgtatgccactgctcttcatttcaaactccttagacaatatggattcaatcctgtatcttcagaggttttcaatgctttcaaagacgagaaaaaggagttcaaagagagtttgagtaaggatgtgaaaggaatggtatgtctatatgaggcttcattctattcatttaggggtgaacccatattagatgaagcaagagatttcacaacaaaacatctcaaacaatacttgatgatgacgaggcaaggtaaaactatatctgttgaccatgatgataataatgatttaatggtgaaattagtggagcatgctttggagcttccagtgcattggagaatgaaaaggttggaggcaaggtggtttattgatatgtatgctgaaatgtctcatcatcatcatatgaattcaacttttcttcaacttgctaaactagattttaacgttgtacaatcaacataccaagaagaccttaaacatgctgtaaggtggtggaaaactactagtctaggagaaaggttaccctttgcaagagataggatagttgaaacgttcttatggagtgtgggagttaaatttgagccacagtttagatattgccgaaaaatgctcacaaagatgggtcaattggtaacctcaatggacgatatatttgacgtgtatggtacgcttgatgagctaagcctctttcaagacgcattggaaaggtgggatataaatacgatagaccaacttccagattacatgaagatattttttttggctgcttataatgtggtgaatgaaatggcgtatgacgtgctaaaacaaaatgggattctcattatcaaatatttaaagaaaacgtggacggatttatgtaaatgttacatgttggaggcaaattggtatcatagtggatacacaccaagcttggaagaatacattaaaaatggatggatatcaattgcagaacccttaattctagtcaatctttattgccttataaccaatccaataaaagaagatgacatggactgcttgcttcaatatcccacctttattcgtatctcaggaatcattgctcgacttgttgatgatttaggaacttcatcggatgaactgaaaagaggagacaatcctaaatcgattcaatgctatatgaaagaaaatggtatttgtgatgaaaagaatggccgtgaacacataaggaatttaatcagtgaaacatggaaggaaatgaatgaagctcgagtgggtgagtctccattttctcaagcttttattgaaactgccatagatttcgttaggacagcaatgatgatataccaaaaggagcaagatggggttggtactaattttgatcattacacaaaagatggaatcatttccttgttcttcacttccattccatttgaaccatattaa

SEQ ID NO: 1662 - DNA, 1728 bp, Cannabis sativa
  source 1..1728: mol_type = genomic DNA
  misc_difference 862: note = a, c, t, g, unknown or other
atgtcactatcaggactaatctccactactactttcaaagaacaaccagcaatagtccgtcgatcaggaaactacaaacccccattgtgggatgctcattttatccaatcactccaagtcatatatacggaggaaagctatgggaaaagaatcaatgagctgaaagaagatgtgagaagaattcttgagaaggaggctgaaaatcctttagttaagcttgaacagattaatgatttgagcagacttggaatatcttatcactttgaagatcaaattaaggcaatattaaacctgacatataataataataatgcattgtggaagaaagataatctgtatgccactgctcttcatttcaaactccttagacaatatggattcaatcctgtatcttcagaggttttcaatgctttcaaagacgagaaaaaggagttcaaagagagtttgagtaaggatgtgaaaggaatggtatgtctatatgaggcttcattctattcatttaggggtgaacccatattagatgaagcaagagatttcacaacaaaacatctcaaacaatacttgatgatgacgaggcaaggtaaaactatatctgttgaccatgatgataataatgatttaatggtgaaattagtggagcatgctttggagcttccagtgcattggagaatgaaaaggttggaggcaaggtggtttattgatatgtatgctgaaatgtctcatcatcatcatatgaattcaacttttcttcaacttgctaaactagattttaacgttgtacaatcaacataccaagaagaccttaaacatgctgtaaggtggtggaaaactactagtctaggagaaaggttaccctttgcangagataggatagttgaaacgttcttatggagtgtgggagttaaatttgagccacagtttagatattgccgaaaaatgctcacaaagatgggtcaattggtaacctcaatggacgatatatttgacgtgtatggtacgcttgatgagctaagcctctttcaagacgcattggaaaggtgggatataaatacgatagaccaacttccagattacatgaagatattttttttggctgcttataatgtggtgaatgaaatggcgtatgacgtgctaaaacaaaatgggattctcattatcaaatatttaaagaaaacgtggacggatttatgtaaatgttacatgttggaggcaaattggtatcatagtggatacacaccaagcttggaagaatacattaaaaatggatggatatcaattgcagaacccttaattctagtcaatctttattgccttataaccaatccaataaaagaagatgacatggactgcttgcttcaatatcccacctttattcgtatctcaggaatcattgctcgacttgttgatgatttaggaacttcatcggatgaactgaaaagaggagacaatcctaaatcgattcaatgctatatgaaagaaaatggtatttgtgatgaaaagaatggccgtgaacacataaggaatttaatcagtgaaacatggaaggaaatgaatgaagctcgagtgggtgagtctccattttctcaagcttttattgaaactgccatagatttcgttaggacagcaatgatgatataccaaaaggagcaagatggggttggtactaattttgatcattacacaaaagatggaatcatttccttgttcttcacttccattcccatttga

SEQ ID NO: 1663 - DNA, 1785 bp, Cannabis sativa
  source 1..1785: mol_type = genomic DNA
atgctttatagaccaaaaatatatactaactataatattattaatggtggtacaaaatcaagattatcaagtgcatgctaccccatccaatgtgctgtggtcaatagttctaatgcaattattgatcgacgatcagccaactttgagccctccatttggtctttcgattatattcaatctcttacaagtcaatataagggagaaccttatacaagtcgagtgaaaaaacttgagagagatgtgaaaaaaatattagttgagatggaaaactctttagctcaacttgaactcattgatacattgcaaagacttggaatatcttaccgttttgagaatgaaataaattctattttgaacaaaaaatatgtcaatattaataatcctaattataatttatatgctattgctcttgaatttaggcttctacgtcaacatggctatgcagtacctcaagagatttttaatcagttgaagaacgagatagaaaacatcaaaaaaaacataaatggtaatgatatcatgggaatattagccttatacgaagcttctttttatgagaaaaaatgcgaaagtattttaaaggaagctagaattttcacaactgaatgtctcaaaaactacactataatgatatcagagcaaaaaaagttaatgattgataatgattatgattatgatatcgaagtagtgaatcatgctttagagctcccacttcatcggaggaccacaagaacagaagcaaagtggttcattgacgcatatgcgaaaaaacaagacatgaatcctatgttgcttgagttagccaaactcgatttcaacatagtacaatcaacacatcatgaagatctaaaacatatattcaggtggtggagacatactaaacttggagagaaattgaattttgcaagagatcgattgatggaatgtttcttatggaatattggaataagatttgagtcaaaattcagctattttagaacaaaaactgccaaattatttgagctagtaacatttatagatgatatatatgatgtttatggaacattggatgaattagagcttttcaccaaagctgttgagagatgggatgtgaaaatgataaatgagttaccagaatacatgaagatgccttatcttgttttacacaataccataaatgacatggtttttgaggtgttaagagaccaagaaatctccatcaacattcaataccttaagaaaacgtgggtcgatatgtgtaaaagtttcttgcaagaggcaaaatggtactatagtggatacacaccaacattggaagaatatattgaaaatggttggatttcagtaggagcaccagttattcttgtgcatgcttatttttttcacgcaaataataatcgcacaattacaaatactaaagagattttcgaatgcttggaatatggttattatcctgccattattcgtcacagtgccataatattacgatttacaaatgacctagcaacatcatcggaggaattgaaaagaggtgatgctccgacatcaattcaatgttacatgcaagaaaaaattgtatctgaagaggaagctcgtgaacatattaagtttttaataaatgaagcatggaaggagatgaataatgatgttggattatatccaatctcattgactgaagatgctacaaactttgctaagatgggatttttcatatatcaacatggtgatggtcatagttctcaagataatcaatccaaacaaaaaatttcatccttgattattgaacctattcccttatatacataa

SEQ ID NO: 1664 - DNA, 1923 bp, Cannabis sativa
  source 1..1923: mol_type = genomic DNA
atggctgcattagtgtccactgtaagtagtattattaggtggaatagtaataataataataataataacttcactagatctgtgaaatcatgtttaagttcaaattaccataataataataatattattcataataaaactgtattaatgtccaccaataataataataataataatcagaagaatagttctcgaagatcagcaaactatcaacccccactttggcaatttgattatgtacaatcactttcttctcctttcaaggatgaagcatatgtcaaaagagttgagaaactaaaggaagaagtaagagtgatggtgaagagagcaagagaggaggagaagcctttatctcaacttgagctaattgatgtattgcaaagacttggaatctcttatcactttgaggatgaaattaatgatatattgaaacatatatataacaacaataatgtgtacaacaccaataataatgtgtatgccaattctcttgaatttagactcctacgacaacatggttatccggtgtctcaagaaatttttagtacgtgcaaagatgaaagaggcaattttatggtgtgtaccaatgatatcaaaggaatgttatctttatatgaagcttcattctatttggtagaaaatgaagatggtattttggaagagacaagagaaaaaacaaaaaaatatcttgaggaatacataatcatgatcatggaaaaacaacaatcattattagatcaaaataataataattatgattatgattatgattatgaactagtgagccatgcattggagcttccacttcattggagaatgttgagattggagagtaggtggtttattgatgtgtatgagaagagactagacatgaaccctactctacttaccttagctaaactagatttcaacattgtccaatcaatataccaagatgatcttaaacatgtcttcagctggtgggaaagcactgatatgggaaagaagttggaatttgcaagagatagaacaatggtgaatttcttatggacagtaggagttgcatttgagccacatttcaaaagttttagaagaatgattacaaaagtaaatgctttaataacagtaatagatgacatatatgatgtttatggtacactagatgaattggagctcttcactaatgcagttgagagatgggatattagtgctatggatgggctccctgagtatatgaagacatgttttcttgctttatacaatttcataaatgatcttccatttgatgtgttaaaaggagaagaaggcctccatataataaaattccttcagaaatcgtgggcagatctttgcaaatcttatttaagagaagcaagatggtattataatggatacacaccaagctttgaagagtacattgagaatgcatggatatcaatatcagggcctgttatactatcacatttatacttttttgtagtgaatccaaacaaggaaaatgccttattaagtacttgctttgatggataccctaccataatacgacattcatcgatgattttacgacttaaagatgatatgggaacttcaacggatgaattgaaaagaggcgatgttcctaaatcaatccaatgcaaaatgtatgaagatggtatatctgaagaggaagctcgtcaacgtattaagttattaataagtgaaacatggaagcttattaataaagattacataaatttggatgatgatgatgatggtggtgatgactactctccaatgttctataagtctaataatattaataaggctttcattgaaatgtgtttaaaccttggtagaatggcacattgcatttatcaatatggagatggacatggaattcaagatcgccaaacaaaagatcatgtactatcattacttattcaccctattcctcttactcaatag

SEQ ID NO: 1665 - DNA, 1908 bp, Cannabis sativa
  source 1..1908: mol_type = genomic DNA
atgcattatatggctgttcaccaatttggtccatcattaatatcatcatcactaccttgcattagtactaataataatcacttaatttgtaaatatttcacaccaaaaacatctattagtcctatttcaaaatcaaaatcaaaatcaaaatcaaaatcaagtacttgctaccccatccaatgtactgtggtcaataatagtagccctagctctactactaaatcttctattgttcgaagatcggccaattatgaacctccgatttggtctttcgattacattcaatctctttcaacccaatataagggagaatcctatacaaggcaattaaataagttaaagaaagaagtgaaaaggatgctccttcgaatggagattaactctttagccctactcgagctaatcgatacattgcaaaggcttggaatatcttatcattttaagaatgaaataaacactattttgaagaaaaaatacacaaatacttatattaacaataatattactaaccataattataatttataccccattgctctcgaatttaggcttctacgcaaacatggctatgcagttcctcaagaaatttttaatatattcaaagacatgagtggaaaatttaaagcaatcataaatgatgatgatattatgggaatattggcgttatatgaagcttcattctatgagaaaaatggtgaaagcatattggaggaagctagggttttcacaaccaagtgtctcgaaaattacatgatgataacagaggaaaacaaattagatgatgacgatgatcataataatattattgtagtaattagacatgcgttagagcttccacttcattggaggactgcaagaacggaggccaagtggtttatcgatgtatacgagaaaagacaagatatgaattctactttgcttgagtttgcaaaactagatttcaacatggtacaatcaatgcatcaagacgatctaaaacatttgtctaggtggtggagtcatactaaactcggagaaaaactgaattttgtgagagataggttgatggggtgttttttatggaatgttggattaagatttgagccagatttcagctactttaggagaatatctgcgagaatatatgttctgattacaataatcgatgatatatatgatgtttacggaacattagaagaattagagcttttcactcgtgttgttgagagatgggatgtaaaactactaaaagacttaccagattatatgaagatgccttttcttgttttacacaataccattaatgaaatggcactagatgtattaaaagaaaaacactttgtcaacattgaatgcctcaagaaaacgtggggtgatatgtgtagatcttttctacaagaggcaaaatggtactataatggatacacaccaacatttcaagaatacattgaaaatggttggatttcagtaggagcaccaattattcttgtgcatgcttatttctcttttgcaaatcccataactaaagaggttttggaaatcttccaacaaggttatcccacaataattcgtcaatctgccatgatcgtacgtttggcaaatgatctagcaacatcatctgaggaattcgaaagaggtgactcgcctaaatcaattcaatgttacatgcaagaacataacgtatctaaagaggaagctcgtgaatacattaagttttcaataagagaaacatggaaggagatgaatagtacttttaatattgaagatggaaattcatcattggttgatgatgccaaaaactttgcaagaatgggattatttatgtatcaacatggagatggacatagttctcaagataatttagcaaaagagcgtatttcaaaattcattatcaatcctatagatatacacgattctctttctttttga

SEQ ID NO: 1666 - DNA, 4321 bp, Cannabis sativa
  source 1..4321: mol_type = genomic DNA
atgcattgcataacccttaaacaccaaatttctccattactccctaatatttgcagtactactaattttggtgtattttttagaccaaaattatatactaattataatattattaaaataatgctacaaaatcaagattatcaagtgcatgctaccccatccaatgtgctgtggtcaatagttctaatgcaattattgatcgacgatcagccaactttgagccctccatttggtctttcgattatattcaatctcttacaagtaatataaggtaattaattaatataattattcttattaattaatattattatttttaaaattaaattaagttttacaaaaatattattttgtatatcaaataatattatctctaaaaaattttttagtcacaataagttgtaacaaaaaaaattataagtcaagtttaattagttatagaaattataatattttgtggctaaatacatttttagttataatgttgtgaatataactaaattagtaattatttgtatttaataatattatctttttaaagtgacatgtagtatgaaaaatctatattttcacaagttttttttttttttttctttgatgtggcataaatcaaaattttcttgaactccatgatgctttagttatttatgtgttaaatttaattatttatttatttatatatgcagggagaaccttatacaagtcgagtgaaaaaacttgagagagatgtgaaaaaaatattagttgagatggaaaactctttagctcaacttgaactcattgatacattgcaaagacttggaatatcttaccgttttgagaatgaaataaattctattttgaacaaaaaatatgtcaatattaataatcctaattataatttatatgcattgctcttcaatttaggcttctacgtcaacatggctatgcagtacctcaaggatatatacttattaattacatacattatataaaccaaatacatgatattatatatatatatatatttatatataattgaatctttatttaagaatattcaatataaaaaattgatggaaagaaaaaagaaaaaattaaagaataaaaaagaaaataattgttttttgaaagccataaataaagttattaataaatttgcaaaataaaaatttgataatgtaaaataaaataaaaatatttatttattttattttttaaatttataatattaaaattaaaattgatttaagccaataaaattatatcatgagtacacagtgacagttttagttgatatttaacagccaaatttaataagtgtattagattagcaaacaaataatactaaagagaattttgtcatcaaaaacaaaaattaagagattaagtctgtaacaatcaaaacatgctagagtttggctgtaaattttttattataataatatatattatataaataataggtattaattttattattattatattgtgtacatttgatatttgatacattaatttggtattttattaatttctttctcttttttgtgtactaatacctctatttagtttaattagtatataattgacaaaaagaaaaaaatgcaatgtacttcaaataatgaattggaattttcgaagatttgggaattaatcattcatagcttttattgagacttatacattttttccaaaataattaaaaaattatattaatctaactaattaacaaaattattccaagacgagaattaaacttttataaaataattaatgattgctcaatcgtagttctttgcagagatttttaatcagttgaaggacgagatagaaaacatcaaaaaaaacataaatggtaatgatatcatgggaatattagccttatacgaagcttctttttatgagaaaaaaggcgaaagtattttaaaggaagctagaattttcacaactaaatgtctcaaaaactacactatcatgatatcagagcaaaaaagttactgattgataatgattatgattatgatatcgaagtagtgaatcatgccttagagctcccacttcatcggaggaccacaagaacagaagcaaagtggttcattgacgcatatgcgaaaaaacaagacatgaatcctatgttgcttgagttagccaaactcaatttcaacacaagtacaatcaacacatcatgaagatctaaaacatatattcaggtgatgatgatgatatcataagttttttttaattaaatttatttatactgattaaataatttattatatatgtaaaaatatataattaattaggtggtggagacatactaaacttggagagaaattgaattttgcaagagatcgattgatggaatgtttcttatggaatattggaataagatttgagtcaaaattcagctattttagaacaaaaactgccaaattatttgagctagtaacatttatagatgatatatatgatgtttatggaacattggatgaattagagcttttcaccaaagctgttgagaggttagtatatatataataaattttgttaataaatatatattatataaatgattatatttacatacacataactatgtaatataataagtgtgtacaatttgagcttgtataattttaattattgggacatacatgcagatgggatgtgaaaatgataaatgagttaccagaatacatgaagatgccttatcttgttttacacaataccataaatgatatggttttgaggtgttaaggaccaaggaatctccatcaacattcaataccttaagaaaacggtaccgtttattatttatttcttattattataaatgacacatagaaaaaattttaattaggtaccatcctataattaatctagctataatgtatgagtgttgttgttcagcaccagcatgctggatcgatcgactcctcaataatgaggtgctcgatactcatatctttagtgtgatagttagtaatctcatgattcgtaaggagaaatattaagtaagttgcatgtgcaattaattccacattgtttgggaaatgtcaaatgacttaaatatattgattggtgttactatattagcaaggtacatgcatcttgttttctgaccttctgataagtttttctaaaatatgtgaatgaagacaaaacactcgctagaaatacttcaagcggggatgtttatttagtgtcgaccaacgacactcatacaaaatattactaattataataataagatagaacaacttcaaataatacgtactataattatattaattaaatatatatgtactaaaaaattataatactaattatggatcgaatctattacatataatgatattcattgtgtagtgggtcgatatgtgtaaaagtttcttgcaagaggcaaaatggtactatagtggatacacaccaacaatggaagaatatattgaaaatggttggatttcagtaggagcaccagttattcttgtgcatgcttatttttttcacgcaaataataatcgtacaattacaaatactaaagagattttcgaatgcttggaatatggttattatcctgccattattcgtcacagtgccataatattacgatttacaaatgacctagcaacatcatcggtaagctaataataaccaactacgcatatgaatttatattttatttagagcatatataatatattattactttaatattttattacaatatttatacttttttgcaccttgtattttacatattattacatgtttgaactcgtatgtaattttattaattaggccggtctctctagattcttaaacttctttttaaagcgctaatagtaaattttttaaaatttatttgtattcaaatatgttaacgcgaaattggatcaaataatcctttttcaactacaagagttatgaaaagagtaaatttttgaaaattatggaacctatttttcaatgatcgatgcaaaaacacaatccttctttaaacaaacaactaagtaattcatttttttatgtattgtatgtataggaggaattgaaaagaggtgatgctccgacatcaattcaatgttacatgcaagaaaaaaatgtatctgaagaagaagctcgtgaacatgttaagtttttaataaatgaagcatggaaggagatgaataatgatgttggattatatccaatctcattgactgaagatgctacaaactttgctaagatgggatttttcatatatcaacatggtgatggtcatagttctcaagataatcaatccaaacaaaaaatttcatccttgattattgaacctattccctatatacataattaa

SEQ ID NO: 1667 - DNA, 1848 bp, Cannabis sativa
  source 1..1848: mol_type = genomic DNA
atgcattgcatggctgttcgccatttcgctccatcgtcatcgctctccatattttcgagtactaatattaataatcatttttttggtagagaaatttttacaccaaaaacatctaatattacaacaaaaaaatcaagatcaagacctaattgcaatccaatccaatgtagtttggccaaaagccctagtagtgatactagtacaattgttagaagatcagccaactatgatcctcccatttggtcttttgatttcattcagtctcttccatgcaaatataagggagaaccctatacaagtcgatcgaataagctaaaagaagaagtgaaaaagatgttagttggaatggaaaactctttagtccaacttgagttgattgatacattacaaagacttggaatatcttatcattttgagaatgaaatcatttctattttgaaagaatatttcactaatattagtactaataaaaaccctaaatatgatttatatgccactgctctcgaatttaggcttttacgcgaatatggatatgcaatacctcaagaaatatttaatgattttaaggacgagacgggaaagttcaaagcgagtattaaaaatgatgatattaagggagtattggctttatatgaagcttcattctatgtgaaaaatggtgaaaatattttggaggaagctagggttttcacaacagaatatctcaaaagatatgtaatgatgattgatcaaaacataatattaaatgataatatggcaatattagtgagacatgccttggagatgccacttcattggaggactataagagcagaagctaagtggttcattgaagaatatgagaagacacaagacaagaatggcactttgcttgaatttgcgaaattggatttcaacatgcttcaatcaatatttcaagaagatctaaaacatgtctcgaggtggtgggaacattctgagcttggaaagaataaaatggtttatgctagagatagattggtagaggcttttctatggcaggttggagtaagatttgagccacaattcagccactttaggagaatatctgcaagaatatatgctctaattacaatcatagatgacatatatgatgtgtatggaacattggaagagttagagcttttcaccaaggctgttgagagatgggatgcgaagaccatacacgagttaccagattatatgaagttgcctttctttactttatttaacaccgtaaatgaaatggcgtatgatgtattagaagagcataattttgtcaccgttgaatacctcaagaactcgtgggcagagttatgtaggtgctatttggaagaggcaaaatggttctatagcggatacaaaccaaccttgaaaaaatatattgagaacgcctcgctttcaataggaggacaaattatttttgtatatgcttttttctctcttacaaagtccataacaaacgaggccttagagtccttgcaagagggtcatcacgctgcatgtcgccaaggatccttaatgttacgacttgcagatgatctaggaacattgtcggatgaaatgaaaagaggcgatgttcctaaatcaattcaatgttatatgcacgatactggtgcttctgaagatgaagctcgtgagcacatcaaatttttgataagtgaaatatggaaggagatgaatgatgaagatgaatataactctattttctctaaagagtttgttcaagcttgcaaaaatcttggtaggatgtcattatttatgtatcaacatggagatggacatgcttctcaagatagccattcaaggaaacgtatttcagatttaattattaatcctattcctttataa

SEQ ID NO: 1668 - DNA, 6572 bp, Cannabis sativa
  source 1..6572: mol_type = genomic DNA
atggctgcattagtgtccactgtaagtagtattattagcttgaatattaataataataataacaccttcactagatctgtgaaatcatgtttaattcaaaccataataattattattattcataataaaactgcattaatgtcaccaataataataataatattaataatattatttctcgaagatcagcaaactatcaaccttcactttggcattttgattatgtacaatcactttctaccctttcaaggtaacaattattattattattattattattattattattattattatttattatttattattatattattattatttattattattattatatgtgcattttctttgttaattttgatgtactaaaagaattatataactcaattttttctttattatataaatgtgtagatatagttagttatatttatatgtacattttgaataatttgaattataacaaactttctatcatatatattttttttgaaattttttaaataatttttatcgttaaaaataaaatttaaaatagttctacgtgtataaataaatacatttaaaattaattatttgaaccaactcattttcaatattgcatatttttatgagtttctcataatatttatattttccactaatcaacccgaaaagggttgattggaattgaaaccctattctgtttgttagttaagaaccgatgcaaatttatggtggtataataatataggtcatatatacttaaattataaacttgatataaaaattaaagataccaaaataatatttatatatatatatatatttagatatgtgttgtgtggtaggaaggagcatatgccaaaagagttgagaaagtaaaggaagaggtaagagtaatggtgaagagagcaaaagaggaggagaagcctttatctcaacttgagcttattgatgtaatgcaaagacttggaatctcttaccactttgagaatgaaattaatgatacattgaaagatatatataacaacaataatgtgtacaacaccaacaataatgtgtatgccaattctcttgaatttagactcctaagacaacatgttatccggtgtctcaaggtatatatataaatatataataatactttttctagtcctttattttcacataattaacacaatcatttgatgaaaattattattatgaatagtagttaaatttaatatttcaaattgtaaatggggtagtctattttaaattcaactactactcatcatcatcatatctaatagtcaccttataatagtattatgcatgcatattcttagatataaataaataaaagttttgatgtgtatatttcaaattatacaaatttatgaatttttatacaatttttgcaaaaatatgttttttctttcaaaaagttatttccatatggaaaaattcaaaaagattataaaaaagttaaattatgaaaaaaaaaaaaaacaatataagataattgattatccatctaattacgttaaggataacgctgaactattttttttcattatttttaactattcttaaatttcccataaaatataaaaccatgttttgtaaactttgctaaaagaaaataaataaaaatgaaaatctctttccaaaatgtatggctaattcataccaacattattgtttctctaccatattttgatgataaattaataattacttaaaatgtttggaattactataattaattgcagaaatatttagtacgtgcaaagatgaaagaggcaattttatggtgtcttccaatgatacaaaggaatgttatctttatatgaagcttcattctatttggtagaaaatgaagatggtattttgaagagacagagaaaaaacaaagaaatatcttgaggaatacataatcatgatcatggaaaaacaacaatcattattagatcaaaataataataatgattatgattatgattatgaactagtgagcatgcattgaacttccacttcattggagaatgttaagattggaagtaggtgtattgatgtgtatgagaagagactagacatgaaccctactctacttaccttagctaaactagattcaacattgtccaatcaatataccaagatgatcttaaacatgtcttcaggtaatataatgtaatgcatttattgggtactttaagattcttacaactattgggagagtcgaatggggtataggctaaaatatcaagcattattattgggcatcagtggtgtccaacaccttctatagctaacgctctacgattagctagcaatattcactaaaaattattttattaagttatatgagatccgatacttaattacactaatagtagtataacatcgagaagggactagacaccaatgatattttttgcaattctctaaaatatccctacatttggccgaaaattttcgttagaaaatgccctaattgttttaatcaacgaaagaaactcgatttgaaatttttgtccaaaacccctacaatgcttactaatcgtgcttgatatggtgtaatgatattggacaccttaaaatgtgacgtaacgttattttattttattataacatgtacgtatatgcagctggtgggaaagcactaatatggaaagaagttggaatttgcaagagatagaacaatggtgaatttcttatggacagtaggagttgcatttgagccacatttcaaaagttttagaagaatgattacaaaagtaaatgctttaataacagtaatagatgacatatatgatgtttatgtgcactagatgaattggagctcttcactaacgcagttgagaggttagtataaaatataaattttgctacttccataatgtggggaaacttaattagtactatttaactatcataagctactttactaattatcaattaattctgagattaaaattcacacttaattagtactattctaatatggtattaaaattaaataaaactcttactagtattcgatctaaatagttagcaaaacagagttattattgtgattcgagataatgaaccaacaataacatcttatatatgattcattcgtctaaattagtgagagagtctcacaatattgataatgtgtaaattaatactacttataataaaatcatggattactattttatacctttaacttattgccaattaattttgagattaaactctatattgcttattatcatacactcatcctatttgtaaactatactcccaaatttcaactacaataataaataataattaataattaatacatgatattttcttttcttttcttaattattattatatatttgtagtatagatgggatattagtgctatggatggctccctgagtatatgaagacatgtttcttgcttatacaatcataaatgatttccatttgaggttaaaagggaagaaggcctccatgtaataaaatccttcagaaatcggtaactgattcttattgttctttggtaggatgtaaacgggacgggcgggtgcgggaatcgctcccccactccataccgcttcttaacttcacctccatacccgcccaatactcgtttaaatttaagtgaggcgggcgggttactcgacggggaagaattccatcgggtacccattacgtacatatatatttttgaaaaaaaaaatgatgtctcaaagagaattaaaaaaaaataatcataaaaactcagtaaaacaataaactaaaatggaatagtgtgtatagtaaaaaaaaaaagagtataatcaataaaaaacctaaagcatgaagttattttaattgtagtggttataattttaaaacttaaatttatacatatatcatatcgggcgggtactattctcccgccccaccttgtttccgactctgatgaatatttaaacacatacccgcctctgcctccgaaagtcatcccttgttccggctccattagggcgggtactcgcgagttcgaatctgcgggtataattgccatccctatctttttgttgtaagagtattgggggaaattttattttttatggttatttttaattgaaaagtttacaaaaaataaaaggagaagttgaagaatacgctctttttaaaacttaactaaatttacatccaaataaagtgtaatttaaatatttttttttatgagtattgtacttaaattaccctcaactctcacataattaagacataatttcgaacataatagattatattctttggagatagatgtataggtttgtgagaaattggataaaatttggttaaaaaaagaatggagactatcgtgaaatgatagggataaattaaattggtaaaatatttttttaaaaaaaactaggtaaataaaagaattttgaaagagggggtaaaaattaaaagcatcaattttaaagaggtatgtagtatatttcctcaaaataaatatggcttttttttttcttcaaaaaaattactttatagaaacactcaaaaatttatgggaaaatcaatttaggaaaccagattataattgtaacagttactttacactatttttttcatatttttattatatatatatataaataaattgccattaaataattttttctttgaaaaaatgtcatattctttttacaaattgtgtaaaaatccatattaggtgtaattttcactttatattaatatatggtcactacaaaaattgttacttttagtgacaatttttaatcactatttttgtgactaaatgtgatttttagtcacgataaaatattacttgtgactaaaatataatattcagttacaagttgtcacaataagtattgtgactaaaaatatttagtcacaataaattataattttcgtgactaagatctttagccacagaccttttagttatcacaacataagaatgatgatttataattatcacaaatttttacttttagtcacaagttttgttgtgattaaaaataaaatttttgtagtggttattttattgggaaatttacacaatatatttaaaaaggaactttttacaatttttttttatatttttatgaatacttttttacattttttttcacagaaaattattacttttttatgtgctcttctcgtagcaagaatgtcaaaacaacaccgttatgaaacaacgaaaaaacaacactatgtgtaattgtaaaaacaaatcatgtattttccgtagcagcaacatcaaacaatattttttcaaaaacagcaaaaaagcaatactgtattttttgttaaaaaaagtaaaaatccatttataaaatattaaaaataacaataaaccgtaaaatgtaaaaaaaaaattatttttatatatttatgatattatccctatttattctatacatagtccactgatgctttttttttgttatgttttagtggcagatctttgcaaatcttatttaagagaacaagatggattaaatggatacacaccaagatttgaagagtacattgagaatgcatggatatcaatatcaggacctgttatactatcacattatacttttttgtagtgaatccaaacatggaagatgcctttaagtacttgctttaatggatacctaccataatacgacattcatcgatgattttacgtcttacagatgatcttgcaacttcaacggtaatgatcgcaactttataattgtgtgactgttttgtagatttttaatatttttagtcaattgataaattataattctattttttttttatctattatatgatcgtgtataatatattacatgcatgatacaatttttaaaaaattcaagtaatttagaatgaattgaaatgacaatttaaacaattattacatttacataaacaacgtgttcaataataaactatttaaatcttggtttcgatattctaaattattaacaagtataatataaaaaaaataattttgaatctcaaaactaattaaaaagtactctatacatattgtcttttaactttgcttatcatggtaaataattagggttagcttaggctaagacaagttaactagttcgtgcctaaggttcactcaatctagggcttaatgattttttttttaaaaatatatatcgtaaaattttaatatcatttttcttaatgtctaatacaattcaaagtcagcactgtaatattaatatatacatatataaatatttttttaggatgaattgaaaagaggcgatgttccaaacaatccaatgcaaaatgtacgaagatggtatactgaagaggaagctcgtcaacgtattaagttattaaaagtgaaacatggaagcttattaataaagattacataaatttggatgatgatgatgatgatggtgatgactactcctccaatgttctatgagtctaataatattaataaggctttcattgaaatgtgtttaaacttggtagaatggcacattgcatttacaatatggagatggacatggaattcaagatcgccaaacaaaagatcatgtactatcattacttattcacctattcctcttacccaatag

SEQ ID NO: 1669 - protein, 639 aa, Cannabis sativa
MQCMAFHQFAPSSSLPIWSSINNRFTPKTSITSISKPKPKLKPKSNLKSRSRSSTCYPIQCTVVDNPSSTITNNSDRRSANYGPPIWSFDFIQSLSTQYKGELYTSRLNKLEKDVKRILVGEENCLAQLELIDTIQRLGLSYRFENEIISILKEKFTNNNNNPNYDLYATALQFRLLRQYGFEVPQEIFNNFKDQKTGEFKANISNDIMGALGLYEASFYGKKGESILDEARIFTTKCLKNYIEKNKLLDDDNNIIALFVNHALETPLHWRINRLEARWFIEMYQKKKDMNFTLLEFAKLDFNMLQSIHQEDLKHLSRWWEQSKLGEKKMENYVRDRLVEAFLWQIGVKFEPQFSQFRRISARLYVLITVIDDIYDVYGTLEELELFTKAIERWDVKAINELPEYMRMPFFFLFNTVNEMGYDTLTDKNFINIEYLKKSWVVWSKYQLEEAKWFYSGYKPTLEEYMKNTWISVGGPIILLHAYFAFTNPLEKASIKFLEEGYDDPSINIHEGSLEISNDGYPTIFHLGSILLRLEDDLGTSSDEMKRGDVPKSIQCYMSDTGVSEDEAREHIKFLIMETWKEMNKEMDFNNYFSKEVVHVCKNLGRTAKFIYLYGDGHASQNNLSKGHISDLIINPIPM

SEQ ID NO: 1670 - DNA, 1737 bp, unidentified
  source 1..1737: mol_type = unassigned DNA
actgtggtcgataaccctagttctacgattattaataatagtgatcgaagatcggccaactatggacctcccatttggtcttttgatttcattcaatctctttcaactcaatataagggtgaactttatacaagtcgattaaataagctggagaaagacgtgaaaaggatactggttggagaggaaaattgtttagctcaacttgagctaattgatacaatacaaagacttggattatcttatcgttttgagaatgaaatcatttctattttgaaagaaaaattcaccaataataataacaaccctaattatgatttatatgctactgctctcaaatttaggcttctacgtcaatatggatttgaagtatctcaagaaattttcaataatttcaaagatcagaagacaggagagttcaaggcaaatataagtaatgatattatgggagcattaggcttatatgaagcttcattctatgggaaaaagggtgaaagtattttggatgaagcaagaattttcacaacaaaatgtctcaaaaattacatagagaaaaacaaattattagatgatgataataatattattgcattatttgttaaccatgctttggagactccacttcattggagaataaataggttggaagctaggtggttcattgagatgtaccagaagaaacatgacatgaatttcacattacttgaatttgccaaattggattttaacatgctccaatcaatacaccaagaagatctaaaacatctatcaagatggtgggagcaatctaaacttggagaaaagaaaatggaaaattatgttagagatagattggtggaggcttttttatggcagattggagtaaaatttgagccacaattcagtcaatttagaagaatatctgcaagattatatgttctaattacagtaattgatgacatatatgatgtgtatggaacattggaggaattagagcttttcacaaaagctattgaaagatgggatgtgaaagccataaatgagttaccagaatatatgagaatgcctttctttttcttattcaatactgtgaatgaaatggggtatgataccttagcagacaaaaatttcatcaacattgaatacctcaagaaatcgtgggtggtttggtctaaatatcaattagaagaggcaaaatggttctatagtggatacaaaccaacattagaagaatatatgaagaatacatggatttcagttgggggaccaattattcttttgcatgcttattttgctttcacaaatcccttagaaaaagcttccataaaattcttggaagaaggttatgatgatccttccataaatattcatgaaggatccctggaaatatcaaatgatggttaccctaccatatttcatcttggatccatacttttacgacttgaagatgacctaggaacatcgtcggatgagatgaaaagaggagatgttccgaaatcaattcaatgttacatgaacgatacaggtgtttctgaagatgaagctcgcgagcacatcaaatttttgataatggaaacatggaaagagatgaataaagaaatggacttcaataattatttctcgaaagaagttgttcatgtttgcaaaaatcttggtagaacagccaaatttatatacctttatggtgatggacatgcttctcagaataatttatcaaagggacatatttcagatttgattattaaccctattcccatgtaa

SEQ ID NO: 1671 - protein, 578 aa, unidentified
TVVDNPSSTIINNSDRRSANYGPPIWSFDFIQSLSTQYKGELYTSRLNKLEKDVKRILVGEENCLAQLELIDTIQRLGLSYRFENEIISILKEKFTNNNNNPNYDLYATALKFRLLRQYGFEVSQEIFNNFKDQKTGEFKANISNDIMGALGLYEASFYGKKGESILDEARIFTTKCLKNYIEKNKLLDDDNNIIALFVNHALETPLHWRINRLEARWFIEMYQKKHDMNFTLLEFAKLDFNMLQSIHQEDLKHLSRWWEQSKLGEKKMENYVRDRLVEAFLWQIGVKFEPQFSQFRRISARLYVLITVIDDIYDVYGTLEELELFTKAIERWDVKAINELPEYMRMPFFFLFNTVNEMGYDTLADKNFINIEYLKKSWVVWSKYQLEEAKWFYSGYKPTLEEYMKNTWISVGGPIILLHAYFAFTNPLEKASIKFLEEGYDDPSINIHEGSLEISNDGYPTIFHLGSILLRLEDDLGTSSDEMKRGDVPKSIQCYMNDTGVSEDEAREHIKFLIMETWKEMNKEMDFNNYFSKEVVHVCKNLGRTAKFIYLYGDGHASQNNLSKGHISDLIINPIPM

What is claimed is:

1. A method of identifying/selecting a plant cultivar comprising at least one terpene synthase gene that produces at least one terpene that has an energizing effect on a subject, comprising:
(a) obtaining a nucleic acid sample from the plant cultivar;
(b) contacting the nucleic acid sample with at least one polynucleotide primer pair comprising a forward primer and a reverse primer under amplification conditions, thereby preparing a mixture, wherein the polynucleotide primer pair hybridizes to a unique subsequence of at least one terpene synthase gene that produces an energetic terpene product profile comprising at least one terpene that has an energizing effect on a subject, wherein the polynucleotide primer pair comprises at least one polynucleotide primer pair selected from among one or more of the primer pairs of:
primer group 1 as set forth in Table 1, and the B3/F3 primer pairs set forth in Table 18;
primer group 2 as set forth in Table 2, and the B3/F3 primer pairs set forth in Tables 22 and 26;
primer group 3 as set forth in Table 3, and the B3/F3 primer pairs set forth in Table 19;
primer group 4 as set forth in Table 4, and the B3/F3 primer pairs set forth in Table 23;
primer group 12 as set forth in the B3/F3 primer pairs set forth in Table 20;
primer group 13 as set forth in the B3/F3 primer pairs set forth in Tables 21;
primer group 14 as set forth in the B3/F3 primer pairs set forth in Table 24;
primer group 5 as set forth in Table 5, and the B3/F3 primer pairs set forth in Table 28;
primer group 6 as set forth in Table 6, and the B3/F3 primer pairs set forth in Table 17;
primer group 19 as set forth in Table 16, and the B3/F3 primer pairs set forth in Table 34; and
primer group 9 as set forth in Table 9, and the B3/F3 primer pairs set forth in Table 30;
(c) amplifying the mixture, thereby obtaining an amplified mixture;
(d) analyzing the amplified mixture of (c), wherein the presence of at least one terpene synthase gene that produces an energetic terpene product profile comprising at least one terpene that has an energizing effect on a subject is identified in the amplified mixture based on the presence of at least one amplified subsequence of the terpene synthase gene; and
(e) identifying and/or selecting a plant cultivar based on the at least one terpene synthase gene that is identified in (d).

2. The method of claim 1, wherein the presence and/or amount of at least one amplicon generated by at least one polynuceotide primer pair of (b) is identified in (d).

3. The method of claim 1, wherein the terpene synthase gene produces an energetic terpene product profile comprising at least one terpene that has an energizing effect on a subject.

4. A plant cultivar identified and/or selected by the method of claim 1.

5. The method of claim 3, wherein the energetic terpene product profile comprises one or more of 3-carene, alpha-terpinene and gamma-terpinene.

6. The method of claim 5, wherein the energetic terpene product profile further comprises terpinolene.

7. The method of claim 5, wherein the terpene synthase gene has the polypeptide sequence set forth in SEQ ID NO:1671.

8. A method of identifying/selecting a plant cultivar comprising at least one terpene synthase gene that produces at least one terpene that has an anti-nociceptive effect on a subject, comprising:
(a) obtaining a nucleic acid sample from the plant cultivar;
(b) contacting the nucleic acid sample with at least one polynucleotide primer pair comprising a forward primer and a reverse primer under amplification conditions, thereby preparing a mixture, wherein the polynucleotide primer pair hybridizes to a unique subsequence of at least one terpene synthase gene that produces an anti-nociceptive terpene product profile comprising at least one terpene that has an anti-nociceptive effect on a subject, wherein the polynucleotide primer pair comprises at least one polynucleotide primer pair selected from among one or more of the primer pairs of:
primer group 1 as set forth in Table 1, and the B3/F3 primer pairs set forth in Table 18;
primer group 4 as set forth in Table 4, and the B3/F3 primer pairs set forth in Table 23;
primer group 5 as set forth in Table 5, and the B3/F3 primer pairs set forth in Table 28;
primer group 6 as set forth in Table 6, and the B3/F3 primer pairs set forth in Table 17;
primer group 8 as set forth in Table 8, and the B3/F3 primer pairs set forth in Table 26;
primer group 9 as set forth in Table 9, and the B3/F3 primer pairs set forth in Table 30;
primer group 10 as set forth in Table 10, and the B3/F3 primer pairs set forth in Table 29; and
primer group 11 as set forth in Table 11, and the B3/F3 primer pairs set forth in Table 27;
(c) amplifying the mixture, thereby obtaining an amplified mixture;
(d) analyzing the amplified mixture of (c), wherein the presence of at least one terpene synthase gene that produces an anti-nociceptive terpene product profile comprising at least one terpene that has an anti-nociceptive effect on a subject is identified in the amplified mixture based on the presence of at least one amplified subsequence of the terpene synthase gene; and
(e) identifying and/or selecting a plant cultivar based on the at least one terpene synthase gene that is identified in (d).

9. The method of claim 8, wherein the presence and/or amount of at least one amplicon generated by at least one polynuceotide primer pair of (b) is identified in (d).

10. The method of claim 8, wherein the terpene synthase gene produces an anti-nociceptive terpene product profile comprising at least one terpene that has an anti-nociceptive effect on a subject.

11. A plant cultivar identified and/or selected by the method of claim 8.

12. The method of claim 10, wherein the anti-nociceptive terpene product profile comprises alpha phellandrene.

13. The method of claim 10, wherein the terpene synthase gene has the polypeptide sequence set forth in SEQ ID NO:1671.

14. A method of identifying/selecting a plant cultivar comprising at least one terpene synthase gene that produces at least one terpene that has an insecticidal effect and/or an insect predator attractant in the plant, comprising:
(a) obtaining a nucleic acid sample from the plant cultivar;
(b) contacting the nucleic acid sample with at least one polynucleotide primer pair comprising a forward primer and a reverse primer under amplification conditions, thereby preparing a mixture, wherein the polynucleotide primer pair hybridizes to a unique subsequence of at least one terpene synthase gene that produces an insecticidal and/or an insect predator attractant terpene product profile comprising at least one terpene that has an insecticidal and/or an insect predator attractant effect in a plant, wherein the polynucleotide primer pair comprises at least one polynucleotide primer pair selected from among one or more of the primer pairs of:
primer group 4 as set forth in Table 4, and the B3/F3 primer pairs set forth in Table 23;
primer group 5 as set forth in Table 5, and the B3/F3 primer pairs set forth in Table 28;
primer group 6 as set forth in Table 6, and the B3/F3 primer pairs set forth in Table 17;
primer group 8 as set forth in Table 8, and the B3/F3 primer pairs set forth in Table 26;
primer group 9 as set forth in Table 9, and the B3/F3 primer pairs set forth in Table 30;
primer group 10 as set forth in Table 10, and the B3/F3 primer pairs set forth in Table 29;
primer group 11 as set forth in Table 11, and the B3/F3 primer pairs set forth in Table 27;
primer group 16 as set forth in Table 13, and the B3/F3 primer pairs set forth in Table 35;
primer group 7 as set forth in Table 7, and the B3/F3 primer pairs set forth in Table 25;
primer group 12 as set forth in the B3/F3 primer pairs set forth in Table 20;
primer group 13 as set forth in the B3/F3 primer pairs set forth in Tables 21;
primer group 14 as set forth in the B3/F3 primer pairs set forth in Table 24;
primer group 15 as set forth in Table 12, and the B3/F3 primer pairs set forth in Table 31;
primer group 17 as set forth in Table 14, and the B3/F3 primer pairs set forth in Table 32; and
primer group 18 as set forth in Table 15 and the B3/F3 primer pairs set forth in Table 33;
(c) amplifying the mixture, thereby obtaining an amplified mixture;
(d) analyzing the amplified mixture of (c), wherein the presence of at least one terpene synthase gene that produces an insecticidal product profile and/or an insect predator attractant terpene product profile comprising at least one terpene that has an insecticidal effect and/or an insect predator attractant effect in a plant is identified in the amplified mixture based on the presence of at least one amplified subsequence of the terpene synthase gene; and
(e) identifying and/or selecting a plant cultivar based on the at least one terpene synthase gene that is identified in (d).

15. The method of claim 14, wherein the presence and/or amount of at least one amplicon generated by at least one polynuceotide primer pair of (b) is identified in (d).

16. The method of claim 1, wherein the terpene synthase gene produces an insecticidal terpene product profile and/or an insect predator attractant terpene product profile comprising at least one terpene that has an insecticidal effect and/or an insect predator attractant effect on a subject plant cultivar.

17. A plant cultivar identified and/or selected by the method of claim 14.

18. The method of claim 16, wherein the insecticidal terpene product profile and/or an insect predator attractant terpene product profile comprises one or both of 3-carene and guaiol.

19. The method of claim 18, wherein the insecticidal terpene product profile and/or an insect predator attractant terpene product profile comprises 3-carene and the terpene synthase gene has the polypeptide sequence set forth in SEQ ID NO:1671.

20. The method of claim 18, wherein the insecticidal terpene product profile and/or an insect predator attractant terpene product profile comprises guaiol and the terpene synthase gene has the polypeptide encoded by the nucleic acid sequence set forth in SEQ ID NO:1408.
